(19) United States
(12) Patent Application Publication
(10) Pub. No.: US 2017/0218079 A1
(43) Pub. Date: Aug. 3, 2017

(54) PSMA and CD3 Bispecific T Cell Engaging Antibody Constructs

(71) Applicant: AMGEN RESEARCH (MUNICH) GMBH, Munich (DE)

(72) Inventors: Tobias Raum, Munich (DE); Markus Münz, Munich (DE); Johannes Brozy, Munich (DE); Peter Kufer, Munich (DE); Patrick Hoffmann, Munich (DE); Matthias Friedrich, Munich (DE); Benno Rattel, Munich (DE); Pamela Bogner, Munich (DE); Andreas Wolf, Munich (DE); Cornelius Pompe, Munich (DE)

(21) Appl. No.: 15/422,661

(22) Filed: Feb. 2, 2017

Related U.S. Application Data
(60) Provisional application No. 62/290,875, filed on Feb. 3, 2016.

(51) Int. Cl. C07K 16/30; C07K 16/28

(52) U.S. Cl. CPC C07K 16/3069; C07K 16/2809; C07K 2317/53; C07K 2317/524; C07K 2317/526; C07K 2317/31; C07K 2317/622; A61K 2039/505

(57) ABSTRACT

The present invention provides bispecific antibody constructs of a specific Fc modality characterized by comprising a first domain binding to PSMA, a second domain binding to an extracellular epitope of the human and the Macaca CD3ε chain and a third domain, which is the specific Fc modality. Moreover, the invention provides a polynucleotide, encoding the antibody construct, a vector comprising this polynucleotide, host cells, expressing the construct and a pharmaceutical composition comprising the same.

### BACKGROUND

[0001] Bispecific antibody derived molecules such as BiTE® (bispecific T cell engager) antibody constructs are recombinant protein constructs made from two flexibly linked antibody derived binding domains. One binding domain of BiTE® antibody constructs is specific for a selected tumor-associated surface antigen on target cells; the second binding domain is specific for CD3, a subunit of the T cell receptor complex on T cells. By their particular design, BiTE® antibody constructs are uniquely suited to transiently connect T cells with target cells and, at the same time, potently activate the inherent cytolytic potential of T cells against target cells. An important further development of the first generation of BiTE® antibody constructs (see WO 99/54440 and WO 2005/040220) developed into the clinic as AMG 103 and AMG 110 was the provision of bispecific antibody constructs binding to a context independent epitope at the N-terminus of the CD3ε chain (WO 2008/119567). BiTE® antibody constructs binding to this elected epitope do not only show cross-species specificity for the human and the Callithrix jacchus, Saguinus oedipus or Saimiri sciureus CD3ε chain, but also, due to recognizing this specific epitope (instead of previously described epitopes of CD3 binders in bispecific T cell engaging molecules), do not unspecifically activate T cells to the same degree as observed for the previous generation of T cell engaging antibodies. This reduction in T cell activation was connected is correlated with less or reduced T cell redistribution in patients, the latter being identified as a risk for side effects.

[0002] Antibody constructs as described in WO 2008/119567 are likely to suffer from rapid clearance from the body; thus, while they are able to reach most parts of the body rapidly, and are quick to produce and easier to handle, their in vivo applications may be limited by their brief persistence in vivo. Prolonged administration by continuous intravenous infusion was used to achieve therapeutic effects because of the short in vivo half-life of this small, single chain molecule. However, such continuous intravenous infusions are classified as inconvenient for the patients and, thus, in case of more convenient alternative treatment approaches, hamper the election of the compound demonstrated to be more efficient in the treatment of the respective disease. Hence, there is a need in the art for bispecific therapeutics that retain similar therapeutic efficacy, that have a format which is straightforward to produce, and that have favorable pharmacokinetic properties, including a longer half-life.

[0003] An increased half-life is generally useful in in vivo applications of immunoglobulins, especially antibodies and most especially antibody fragments of small size. Approaches described in the art to achieve such effect comprise the fusion of the small bispecific antibody construct to larger proteins, which preferably do not interfere with the therapeutic effect of the BiTE®. Examples for such further developments of bispecific T cell engagers comprise bispecifc Fc-molecules e.g. described in US 2014/0302037, US 2014/0308285, WO 2014/144722, WO 2014/151910 and WO 2015/048272. An alternative strategy is the use of HSA fused to the bispecific molecule or the mere fusion of human albumin binding peptides (see e.g. WO2013/128027, WO2014/140358).

[0004] Several markers for prostate cancer have been identified, including e.g. prostate-specific antigen (PSA), the six-transmembrane epithelial antigen of the prostate (STEAP) (Hubert et al., PNAS 96 (1999), 14523-14528), the prostate stem cell antigen (PSCA) (Reiter et al., Proc. Nat. Acad. Sci. 95: 1735-1740, 1998) and the prostate-specific membrane antigen (PSMA; PSM) (Israeli et al., Cancer Res. 53 (1993). PSMA was originally defined by the monoclonal antibody (MAb) 7E11 derived from immunization with a partially purified membrane preparation from the lymph node prostatic adenocarcinoma (LNCaP) cell line (Horoszewicz et al., Anticancer Res. 7 (1987), 927-35). A 2.65-kb cDNA fragment encoding the PSMA protein was cloned and subsequently mapped to chromosome 11p11.2 (Israeli et al., loc. cit.; O'Keefe et al., Biochem. Biophys. Acta 1443 (1998), 113-127). Initial analysis of PSMA demonstrated widespread expression within the cells of the prostatic secretory epithelium. Immunohistochemical staining demonstrated that PSMA was absent to moderately expressed in hyperplastic and benign tissues, while malignant tissues stained with the greatest intensity (Horoszewicz et al., loc. cit.). Subsequent investigations have recapitulated these results and evinced PSMA expression as a universal feature in practically every prostatic tissue examined to date. These reports further demonstrate that expression of PSMA increases precipitously proportional to tumor aggressiveness (Burger et al., Int. J. Cancer 100 (2002), 228-237; Chang et al., Cancer Res. 59 (1999), 3192-98; Chang et al., Urology 57 (2001), 1179-83), Kawakami and Nakayama, Cancer Res. 57 (1997), 2321-24; Liu et al., Cancer Res. 57 (1997), 3629-34; Lopes et al., Cancer Res. 50 (1990), 6423-29; Silver et al., Clin. Cancer Res. 9 (2003), 6357-62; Sweat et al., Urology 52 (1998), 637-40; Troyer et al., Int. J. Cancer 62 (1995), 552-558; Wright et al., Urology 48 (1996), 326-334). Consistent with the correlation between PSMA expression and tumor stage, increased levels of PSMA are associated with androgen-independent prostate cancer (PCa). Analysis of tissue samples from patients with prostate cancer has demonstrated elevated PSMA levels after physical castration or androgen-deprivation therapy. Unlike expression of prostate specific antigen, which is downregulated after androgen ablation, PSMA expression is significantly increased in both primary and metastatic tumor specimens (Kawakami et al., Wright et al., loc. cit.). Consistent with the elevated expression in androgen-independent tumors, PSMA transcription is also known to be downregulated by steroids, and administration of testosterone mediates a dramatic reduction in PSMA protein and mRNA levels (Israeli et al., Cancer Res. 54 (1994), 1807-11; Wright et al., loc. cit.). PSMA is also highly expressed in secondary prostatic tumors and occult metastatic disease. Immunohistochemical analysis has revealed relatively intense and homogeneous expression of PSMA within metastatic lesions localized to lymph nodes, bone, soft tissue, and lungs compared with benign prostatic tissues (Chang et al. (2001), loc. cit.; Murphy et al., Cancer 78 (1996), 809-818; Sweat et al., loc. cit.). Some reports have also indicated limited PSMA expression in extraprostatic tissues, including a subset of renal proximal tubules, some cells of the intestinal brush-border membrane, and rare cells in the colonic crypts (Chang et al. (1999), Horoszewicz et al., Israeli et al. (1994), Lopes et al., Troyer et al., loc. cit.). However, the levels of PSMA in these tissues are generally two to three orders of magnitude less than those observed in the prostate (Sokoloff et al., Prostate 43 (2000), 150-157). PSMA is also expressed in the tumor-associated neovasculature of most solid cancers examined yet is absent in the normal vascular endothelium (Chang et al. (1999), Liu et al., Silver et al., loc. cit.). Although the significance of PSMA expression within the vasculature is unknown, the specificity for tumor-associated endothelium makes PSMA a potential target for the treatment of many forms of malignancy.

### SUMMARY

[0005] All the half-life extending formats (HLE formats) of bispecific T cell engaging molecules described in the art, which included the hetero Fc (also designated as heterodimeric Fc, hetFc or hFc) format and the fusion of human serum albumin (also designated as HSA or hALB) had individual disadvantages such as unspecific T cell activation, complement activation, instability, or a pharmacokinetic profile which does not meet the desired half-life prolongation of the molecules. It is thus the object of the present invention to provide a half-life extending format of bispecific T cell engaging molecules, which overcomes at least one and, of course, preferably more than one of these individual defects observed for the state of the art molecules. Accordingly, the present invention provides antibody constructs of a specific Fc modality characterized by comprising a first domain binding to PSMA, a second domain binding to an extracellular epitope of the human and the Macaca CD3ε chain, and a third domain, which is the specific Fc modality. Moreover, the invention provides a polynucleotide encoding the antibody construct, a vector comprising this polynucleotide, host cells expressing the construct and a pharmaceutical composition comprising the same.

### DESCRIPTION OF THE FIGURES

[0006] FIGS. 1A-1D: FIG. 1A shows a diagram of one embodiment of an antibody construct of the invention. FIG. 1B shows a heterodimeric Fc antibody construct and FIG. 10 shows a X-body construct described in the art. The indicated charged pairs are introduced in order to enforce the heterodimerization. FIG. 1D shows the fusion of an antibody construct with a human serum albumin (HSA/hALB).

[0007] FIGS. 2A-2B: Evaluation of Target-independent T Cell Activation by Target A HLE BiTE® antibody constructs. FIG. 2A—antibody construct of the invention in a 48 h activation assay with human PBMC (3×); HLE BiTE® serial dilutions (start 20 nM; 1:5, 7×+blank); w/o or with FcR blocking [10 mg/mL huIgG (Kiovog, Baxter)]; FACS measurement of CD69 and CD25 [not shown] expression on CD4⁺, CD8⁺ T cells. FIG. 2B—Hetero-Fc antibody construct in 48 h activation assay with human PBMC and CD14⁺/CD33⁺ cell depleted PBMC (3×); HLE BiTE® serial dilutions (start 20 nM; 1:5, 7×+blank); FACS measurement of CD69 and CD25 [not shown] expression on CD4⁺, CD8⁺ T cells.

[0008] FIGS. 3A-3F: Evaluation of Target-independent T Cell Activation by Target B HLE BiTE® antibody constructs. FIG. 3A—antibody construct of the invention in a 48 h activation assay with human PBMC (3×); HLE BiTE® serial dilutions (start 20 nM; 1:5, 7×+blank); w/o or with FcR blocking [10 mg/mL huIgG (Kiovog, Baxter)]; FACS measurement of CD69 and CD25 [not shown] expression on CD4⁺, CD8⁺ T cells. FIG. 3B—Hetero-Fc antibody construct in a 48 h activation assay with human PBMC and CD14⁺/CD33⁺ cell depleted PBMC (3×); HLE BiTE® serial dilutions (start 20 nM; 1:5, 7×+blank); FACS measurement of CD69 and CD25 [not shown] expression on CD4⁺, CD8⁺ T cells. FIG. 3C—X-body construct in a 48 h activation assay with human PBMC and CD14⁺/CD33⁺ cell depleted PBMC (3×); HLE BiTE® serial dilutions (start 20 nM; 1:5, 7×+blank); FACS measurement of CD69 and CD25 [not shown] expression on CD4⁺, CD8⁺ T cells. FIGS. 3D-4F—Isolated PBMC from three different healthy human donors were cultured with increasing concentrations of HLE bispecific antibody constructs specific for Target B antigens for 48 h. The expression of the activation marker CD69 on CD4+ and CD8+ T cells was determined by flow cytometric analysis using a PE-Cy7 conjugated mab specific for CD69.

[0009] FIG. 4: Complement C1q Binding of BiTE® Fc fusion antibody constructs. BiTE® Fc fusion antibody constructs (BiTE® single chain Fc (triangle), BiTE® hetero Fc (squares), canonical BiTE® (circle)) were coated on a Maxisorp plate (in dilution series), prior to incubation with pooled human serum and incubation with polyclonal anti-human CC1q murine antibody, visualized by goat anti-mouse Fc-AP conjugate.

[0010] FIG. 5: Mean PK profiles of two different PSMA BiTE®-HLE antibody constructs after single dose administration in cynomolgus monkeys. For reasons of comparability, serum concentrations were dose-normalized to 15 μg/kg and indicated in nmol.

[0011] FIG. 6: Bispecific scFc variants D9F (SEQ ID NO: 481), T2G (SEQ ID NO: 482), D3L (SEQ ID NO: 483, 171 (SEQ ID NO: 484) and K6C (SEQ ID NO: 485). A preferred antibody construct of the present invention is shown in SEQ ID NO: 481.

[0012] FIGS. 7A-7B: Surface Plasmon Resonance (SPR)-based determination of binding to human FcRn. Constructs D9F, T2G, D3L, T7I and K6C were each tested for their capability of binding against human FcRn in SPR (Biacore) experiments. The maximal binding during the injection phase was measured for all constructs as the respective response units (RU), equivalent to the molecular mass increase on the FcRn coated CM5 chip due to bound construct. All constructs were measured in duplicates. Average values of the duplicate determinations are depicted in FIGS. 7A and 7B.

[0013] FIG. 8: The constructs D9F, T2G, D3L, T7I and K6C and a human IgG1-kappa antibody MT201 were each tested for their capability of binding against human FcRn in SPR (Biacore) experiments. The maximal binding during the injection phase was measured for all constructs as the respective response units (RU), equivalent to the molecular mass increase on the FcRn coated CM5 chip due to bound construct. All constructs were measured in duplicates. Average values of the duplicate determinations are depicted including standard deviation error bars

### DETAILED DESCRIPTION

[0014] In addition to the significantly prolonged half-life of antibody constructs of the invention, which are preferably bispecific, the fusion of the specific Fc modality, i.e., the third domain according to the present invention, is responsible for a surprising significant impact on the first and second binding domain of the antibody construct of the invention. Thus, while other half-life extending modalities of T cell engaging antibody constructs show individual preferred features, the election of the present specific Fc modality allows for the provision of bispecific molecules which typically show a broad spectrum of preferred characteristics of a robust molecular format and, thus, allow for the development of promising pharmaceutical compositions.

[0015] Thus, the present invention provides an antibody construct comprising:
[0016] a first domain which binds to PSMA,
[0017] a second domain which binds to an extracellular epitope of the human and the Macaca CD3ε chain; and
[0018] a third domain which comprises two polypeptide monomers, each comprising a hinge, a CH2 domain and a CH3 domain, wherein said two polypeptide monomers are fused to each other via a peptide linker.

[0019] The term “antibody construct” refers to a molecule in which the structure and/or function is/are based on the structure and/or function of an antibody, e.g., of a full-length or whole immunoglobulin molecule. An antibody construct is hence capable of binding to its specific target or antigen and/or is/are drawn from the variable heavy chain (VH) and/or variable light chain (VL) domains of an antibody or fragment thereof. Furthermore, the binding domain of an antibody construct according to the invention comprises the minimum structural requirements of an antibody which allow for the target binding. This minimum requirement may e.g. be defined by the presence of at least the three light chain CDRs (i.e. CDR1, CDR2 and CDR3 of the VL region) and/or the three heavy chain CDRs (i.e. CDR1, CDR2 and CDR3 of the VH region), preferably of all six CDRs. An alternative approach to define the minimal structure requirements of an antibody is the definition of the epitope of the antibody within the structure of the specific target, respectively, the protein domain of the target protein composing the epitope region (epitope cluster) or by reference to an specific antibody competing with the epitope of the defined antibody. The antibodies on which the constructs according to the invention are based include for example monoclonal, recombinant, chimeric, deimmunized, humanized and human antibodies.

[0020] The binding domain of an antibody construct according to the invention may e.g. comprise the above referred groups of CDRs. Preferably, those CDRs are comprised in the framework of an antibody light chain variable region (VL) and an antibody heavy chain variable region (VH); however, it does not have to comprise both. Fd fragments, for example, have two VH regions and often retain some antigen-binding function of the intact antigen-binding domain. Additional examples for the format of antibody fragments, antibody variants or binding domains include (1) a Fab fragment, a monovalent fragment having the VL, VH, CL and CH1 domains; (2) a F(ab′)₂ fragment, a bivalent fragment having two Fab fragments linked by a disulfide bridge at the hinge region; (3) an Fd fragment having the two VH and CH1 domains; (4) an Fv fragment having the VL and VH domains of a single arm of an antibody, (5) a dAb fragment (Ward et al., (1989) Nature 341:544-546), which has a VH domain; (6) an isolated complementarity determining region (CDR), and (7) a single chain Fv (scFv), the latter being preferred (for example, derived from an scFV-library). Examples for embodiments of antibody constructs according to the invention are e.g. described in WO 00/006605, WO 2005/040220, WO 2008/119567, WO 2010/037838, WO 2013/026837, WO 2013/026833, US 2014/0308285, US 2014/0302037, WO 2014/144722, WO 2014/151910, and WO 2015/048272.

[0021] Also within the definition of “binding domain” or “domain which binds” are fragments of full-length antibodies, such as VH, VHH, VL, (s)dAb, Fv, Fd, Fab, Fab′, F(ab′)2 or “r IgG” (“half antibody”). Antibody constructs according to the invention may also comprise modified fragments of antibodies, also called antibody variants, such as scFv, di-scFv or bi(s)-scFv, scFv-Fc, scFv-zipper, scFab, Fab₂, Fab₃, diabodies, single chain diabodies, tandem diabodies (Tandab's), tandem di-scFv, tandem tri-scFv, “multibodies” such as triabodies or tetrabodies, and single domain antibodies such as nanobodies or single variable domain antibodies comprising merely one variable domain, which may be VHH, VH or VL, that specifically bind an antigen or epitope independently of other V regions or domains.

[0022] As used herein, the terms “single-chain Fv,” “single-chain antibodies” or “scFv” refer to single polypeptide chain antibody fragments that comprise the variable regions from both the heavy and light chains, but lack the constant regions. Generally, a single-chain antibody further comprises a polypeptide linker between the VH and VL domains which enables it to form the desired structure which would allow for antigen binding. Single chain antibodies are discussed in detail by Pluckthun in The Pharmacology of Monoclonal Antibodies, vol. 113, Rosenburg and Moore eds. Springer-Verlag, New York, pp. 269-315 (1994). Various methods of generating single chain antibodies are known, including those described in U.S. Pat. Nos. 4,694,778 and 5,260,203; International Patent Application Publication No. WO 88/01649; Bird (1988) Science 242:423-442; Huston et al. (1988) Proc. Natl. Acad. Sci. USA 85:5879-5883; Ward et al. (1989) Nature 334:54454; Skerra et al. (1988) Science 242:1038-1041. In specific embodiments, single-chain antibodies can also be bispecific, multispecific, human, and/or humanized and/or synthetic.

[0023] Furthermore, the definition of the term “antibody construct” includes monovalent, bivalent and polyvalent/multivalent constructs and, thus, bispecific constructs, specifically binding to only two antigenic structure, as well as polyspecific/multispecific constructs, which specifically bind more than two antigenic structures, e.g. three, four or more, through distinct binding domains. Moreover, the definition of the term “antibody construct” includes molecules consisting of only one polypeptide chain as well as molecules consisting of more than one polypeptide chain, which chains can be either identical (homodimers, homotrimers or homo oligomers) or different (heterodimer, heterotrimer or heterooligomer). Examples for the above identified antibodies and variants or derivatives thereof are described inter alia in Harlow and Lane, Antibodies a laboratory manual, CSHL Press (1988) and Using Antibodies: a laboratory manual, CSHL Press (1999), Kontermann and Dübel, Antibody Engineering, Springer, 2nd ed. 2010 and Little, Recombinant Antibodies for Immunotherapy, Cambridge University Press 2009.

[0024] The term “bispecific” as used herein refers to an antibody construct which is “at least bispecific”, i.e., it comprises at least a first binding domain and a second binding domain, wherein the first binding domain binds to one antigen or target (here: PSMA), and the second binding domain binds to another antigen or target (here: CD3). Accordingly, antibody constructs according to the invention comprise specificities for at least two different antigens or targets. For example, the first domain does preferably not bind to an extracellular epitope of CD3□ of one or more of the species as described herein. The term “target cell surface antigen” refers to an antigenic structure expressed by a cell and which is present at the cell surface such that it is accessible for an antibody construct as described herein. It may be a protein, preferably the extracellular portion of a protein, or a carbohydrate structure, preferably a carbohydrate structure of a protein, such as a glycoprotein. It is preferably a tumor antigen. The term “bispecific antibody construct” of the invention also encompasses multispecific antibody constructs such as trispecific antibody constructs, the latter ones including three binding domains, or constructs having more than three (e.g. four, five . . . ) specificities.

[0025] Given that the antibody constructs according to the invention are (at least) bispecific, they do not occur naturally and they are markedly different from naturally occurring products. A “bispecific” antibody construct or immunoglobulin is hence an artificial hybrid antibody or immunoglobulin having at least two distinct binding sides with different specificities. Bispecific antibody constructs can be produced by a variety of methods including fusion of hybridomas or linking of Fab′ fragments. See, e.g., Songsivilai & Lachmann, Clin. Exp. Immunol. 79:315-321 (1990).

[0026] The at least two binding domains and the variable domains (VH/VL) of the antibody construct of the present invention may or may not comprise peptide linkers (spacer peptides). The term “peptide linker” comprises in accordance with the present invention an amino acid sequence by which the amino acid sequences of one (variable and/or binding) domain and another (variable and/or binding) domain of the antibody construct of the invention are linked with each other. The peptide linkers can also be used to fuse the third domain to the other domains of the antibody construct of the invention. An essential technical feature of such peptide linker is that it does not comprise any polymerization activity. Among the suitable peptide linkers are those described in U.S. Pat. Nos. 4,751,180 and 4,935,233 or WO 88/09344. The peptide linkers can also be used to attach other domains or modules or regions (such as half-life extending domains) to the antibody construct of the invention.

[0027] The antibody constructs of the present invention are preferably “in vitro generated antibody constructs”. This term refers to an antibody construct according to the above definition where all or part of the variable region (e.g., at least one CDR) is generated in a non-immune cell selection, e.g., an in vitro phage display, protein chip or any other method in which candidate sequences can be tested for their ability to bind to an antigen. This term thus preferably excludes sequences generated solely by genomic rearrangement in an immune cell in an animal. A “recombinant antibody” is an antibody made through the use of recombinant DNA technology or genetic engineering.

[0028] The term “monoclonal antibody” (mAb) or monoclonal antibody construct as used herein refers to an antibody obtained from a population of substantially homogeneous antibodies, i.e., the individual antibodies comprising the population are identical except for possible naturally occurring mutations and/or post-translation modifications (e.g., isomerizations, amidations) that may be present in minor amounts. Monoclonal antibodies are highly specific, being directed against a single antigenic side or determinant on the antigen, in contrast to conventional (polyclonal) antibody preparations which typically include different antibodies directed against different determinants (or epitopes). In addition to their specificity, the monoclonal antibodies are advantageous in that they are synthesized by the hybridoma culture, hence uncontaminated by other immunoglobulins. The modifier “monoclonal” indicates the character of the antibody as being obtained from a substantially homogeneous population of antibodies, and is not to be construed as requiring production of the antibody by any particular method.

[0029] For the preparation of monoclonal antibodies, any technique providing antibodies produced by continuous cell line cultures can be used. For example, monoclonal antibodies to be used may be made by the hybridoma method first described by Koehler et al., Nature, 256: 495 (1975), or may be made by recombinant DNA methods (see, e.g., U.S. Pat. No. 4,816,567). Examples for further techniques to produce human monoclonal antibodies include the trioma technique, the human B-cell hybridoma technique (Kozbor, Immunology Today 4 (1983), 72) and the EBV-hybridoma technique (Cole et al., Monoclonal Antibodies and Cancer Therapy, Alan R. Liss, Inc. (1985), 77-96).

[0030] Hybridomas can then be screened using standard methods, such as enzyme-linked immunosorbent assay (ELISA) and surface plasmon resonance (BIACORE™) analysis, to identify one or more hybridomas that produce an antibody that specifically binds with a specified antigen. Any form of the relevant antigen may be used as the immunogen, e.g., recombinant antigen, naturally occurring forms, any variants or fragments thereof, as well as an antigenic peptide thereof. Surface plasmon resonance as employed in the BIAcore system can be used to increase the efficiency of phage antibodies which bind to an epitope of a target cell surface antigen (Schier, Human Antibodies Hybridomas 7 (1996), 97-105; Malmborg, J. Immunol. Methods 183 (1995), 7-13).

[0031] Another exemplary method of making monoclonal antibodies includes screening protein expression libraries, e.g., phage display or ribosome display libraries. Phage display is described, for example, in Ladner et al., U.S. Pat. No. 5,223,409; Smith (1985) Science 228:1315-1317, Clackson et al., Nature, 352: 624-628 (1991) and Marks et al., J. Mol. Biol., 222: 581-597 (1991).

[0032] In addition to the use of display libraries, the relevant antigen can be used to immunize a non-human animal, e.g., a rodent (such as a mouse, hamster, rabbit or rat). In one embodiment, the non-human animal includes at least a part of a human immunoglobulin gene. For example, it is possible to engineer mouse strains deficient in mouse antibody production with large fragments of the human Ig (immunoglobulin) loci. Using the hybridoma technology, antigen-specific monoclonal antibodies derived from the genes with the desired specificity may be produced and selected. See, e.g., XENOMOUSE™, Green et al. (1994) Nature Genetics 7:13-21, US 2003-0070185, WO 96/34096, and WO 96/33735.

[0033] A monoclonal antibody can also be obtained from a non-human animal, and then modified, e.g., humanized, deimmunized, rendered chimeric etc., using recombinant DNA techniques known in the art. Examples of modified antibody constructs include humanized variants of non-human antibodies, “affinity matured” antibodies (see, e.g. Hawkins et al. J. Mol. Biol. 254, 889-896 (1992) and Lowman et al., Biochemistry 30, 10832-10837 (1991)) and antibody mutants with altered effector function(s) (see, e.g., U.S. Pat. No. 5,648,260, Kontermann and Dübel (2010), loc. cit. and Little (2009), loc. cit.).

[0034] In immunology, affinity maturation is the process by which B cells produce antibodies with increased affinity for antigen during the course of an immune response. With repeated exposures to the same antigen, a host will produce antibodies of successively greater affinities. Like the natural prototype, the in vitro affinity maturation is based on the principles of mutation and selection. The in vitro affinity maturation has successfully been used to optimize antibodies, antibody constructs, and antibody fragments. Random mutations inside the CDRs are introduced using radiation, chemical mutagens or error-prone PCR. In addition, the genetic diversity can be increased by chain shuffling. Two or three rounds of mutation and selection using display methods like phage display usually results in antibody fragments with affinities in the low nanomolar range.

[0035] A preferred type of an amino acid substitutional variation of the antibody constructs involves substituting one or more hypervariable region residues of a parent antibody (e.g. a humanized or human antibody). Generally, the resulting variant(s) selected for further development will have improved biological properties relative to the parent antibody from which they are generated. A convenient way for generating such substitutional variants involves affinity maturation using phage display. Briefly, several hypervariable region sides (e.g. 6-7 sides) are mutated to generate all possible amino acid substitutions at each side. The antibody variants thus generated are displayed in a monovalent fashion from filamentous phage particles as fusions to the gene III product of M13 packaged within each particle. The phage-displayed variants are then screened for their biological activity (e.g. binding affinity) as herein disclosed. In order to identify candidate hypervariable region sides for modification, alanine scanning mutagenesis can be performed to identify hypervariable region residues contributing significantly to antigen binding. Alternatively, or additionally, it may be beneficial to analyze a crystal structure of the antigen-antibody complex to identify contact points between the binding domain and, e.g., human PSMA. Such contact residues and neighbouring residues are candidates for substitution according to the techniques elaborated herein. Once such variants are generated, the panel of variants is subjected to screening as described herein and antibodies with superior properties in one or more relevant assays may be selected for further development.

[0036] The monoclonal antibodies and antibody constructs of the present invention specifically include “chimeric” antibodies (immunoglobulins) in which a portion of the heavy and/or light chain is identical with or homologous to corresponding sequences in antibodies derived from a particular species or belonging to a particular antibody class or subclass, while the remainder of the chain(s) is/are identical with or homologous to corresponding sequences in antibodies derived from another species or belonging to another antibody class or subclass, as well as fragments of such antibodies, so long as they exhibit the desired biological activity (U.S. Pat. No. 4,816,567; Morrison et al., Proc. Natl. Acad. Sci. USA, 81: 6851-6855 (1984)). Chimeric antibodies of interest herein include “primitized” antibodies comprising variable domain antigen-binding sequences derived from a non-human primate (e.g., Old World Monkey, Ape etc.) and human constant region sequences. A variety of approaches for making chimeric antibodies have been described. See e.g., Morrison et al., Proc. Natl. Acad. ScL U.S.A. 81:6851, 1985; Takeda et al., Nature 314:452, 1985, Cabilly et al., U.S. Pat. No. 4,816,567; Boss et al., U.S. Pat. No. 4,816,397; Tanaguchi et al., EP 0171496; EP 0173494; and GB 2177096.

[0037] An antibody, antibody construct, antibody fragment or antibody variant may also be modified by specific deletion of human T cell epitopes (a method called “deimmunization”) by the methods disclosed for example in WO 98/52976 or WO 00/34317. Briefly, the heavy and light chain variable domains of an antibody can be analyzed for peptides that bind to MHC class II; these peptides represent potential T cell epitopes (as defined in WO 98/52976 and WO 00/34317). For detection of potential T cell epitopes, a computer modeling approach termed “peptide threading” can be applied, and in addition a database of human MHC class II binding peptides can be searched for motifs present in the VH and VL sequences, as described in WO 98/52976 and WO 00/34317. These motifs bind to any of the 18 major MHC class II DR allotypes, and thus constitute potential T cell epitopes. Potential T cell epitopes detected can be eliminated by substituting small numbers of amino acid residues in the variable domains, or preferably, by single amino acid substitutions. Typically, conservative substitutions are made. Often, but not exclusively, an amino acid common to a position in human germline antibody sequences may be used. Human germline sequences are disclosed e.g. in Tomlinson, et al. (1992) J. Mol. Biol. 227:776-798; Cook, G. P. et al. (1995) Immunol. Today Vol. 16 (5): 237-242; and Tomlinson et al. (1995) EMBO J. 14: 14:4628-4638. The V BASE directory provides a comprehensive directory of human immunoglobulin variable region sequences (compiled by Tomlinson, L A. et al. MRC Centre for Protein Engineering, Cambridge, UK). These sequences can be used as a source of human sequence, e.g., for framework regions and CDRs. Consensus human framework regions can also be used, for example as described in U.S. Pat. No. 6,300,064.

[0038] “Humanized” antibodies, antibody constructs, variants or fragments thereof (such as Fv, Fab, Fab′, F(ab′)2 or other antigen-binding subsequences of antibodies) are antibodies or immunoglobulins of mostly human sequences, which contain (a) minimal sequence(s) derived from non-human immunoglobulin. For the most part, humanized antibodies are human immunoglobulins (recipient antibody) in which residues from a hypervariable region (also CDR) of the recipient are replaced by residues from a hypervariable region of a non-human (e.g., rodent) species (donor antibody) such as mouse, rat, hamster or rabbit having the desired specificity, affinity, and capacity. In some instances, Fv framework region (FR) residues of the human immunoglobulin are replaced by corresponding non-human residues. Furthermore, “humanized antibodies” as used herein may also comprise residues which are found neither in the recipient antibody nor the donor antibody. These modifications are made to further refine and optimize antibody performance. The humanized antibody may also comprise at least a portion of an immunoglobulin constant region (Fc), typically that of a human immunoglobulin. For further details, see Jones et al., Nature, 321: 522-525 (1986); Reichmann et al., Nature, 332: 323-329 (1988); and Presta, Curr. Op. Struct. Biol., 2: 593-596 (1992).

[0039] Humanized antibodies or fragments thereof can be generated by replacing sequences of the Fv variable domain that are not directly involved in antigen binding with equivalent sequences from human Fv variable domains. Exemplary methods for generating humanized antibodies or fragments thereof are provided by Morrison (1985) Science 229:1202-1207; by Oi et al. (1986) BioTechniques 4:214; and by U.S. Pat. No. 5,585,089; U.S. Pat. No. 5,693,761; U.S. Pat. No. 5,693,762; U.S. Pat. No. 5,859,205; and U.S. Pat. No. 6,407,213. Those methods include isolating, manipulating, and expressing the nucleic acid sequences that encode all or part of immunoglobulin Fv variable domains from at least one of a heavy or light chain. Such nucleic acids may be obtained from a hybridoma producing an antibody against a predetermined target, as described above, as well as from other sources. The recombinant DNA encoding the humanized antibody molecule can then be cloned into an appropriate expression vector.

[0040] Humanized antibodies may also be produced using transgenic animals such as mice that express human heavy and light chain genes, but are incapable of expressing the endogenous mouse immunoglobulin heavy and light chain genes. Winter describes an exemplary CDR grafting method that may be used to prepare the humanized antibodies described herein (U.S. Pat. No. 5,225,539). All of the CDRs of a particular human antibody may be replaced with at least a portion of a non-human CDR, or only some of the CDRs may be replaced with non-human CDRs. It is only necessary to replace the number of CDRs required for binding of the humanized antibody to a predetermined antigen.

[0041] A humanized antibody can be optimized by the introduction of conservative substitutions, consensus sequence substitutions, germline substitutions and/or back mutations. Such altered immunoglobulin molecules can be made by any of several techniques known in the art, (e.g., Teng et al., Proc. Natl. Acad. Sci. U.S.A., 80: 7308-7312, 1983; Kozbor et al., Immunology Today, 4: 7279, 1983; Olsson et al., Meth. Enzymol., 92: 3-16, 1982, and EP 239 400).

[0042] The term “human antibody”, “human antibody construct” and “human binding domain” includes antibodies, antibody constructs and binding domains having antibody regions such as variable and constant regions or domains which correspond substantially to human germline immunoglobulin sequences known in the art, including, for example, those described by Kabat et al. (1991) (loc. cit.). The human antibodies, antibody constructs or binding domains of the invention may include amino acid residues not encoded by human germline immunoglobulin sequences (e.g., mutations introduced by random or side-specific mutagenesis in vitro or by somatic mutation in vivo), for example in the CDRs, and in particular, in CDR3. The human antibodies, antibody constructs or binding domains can have at least one, two, three, four, five, or more positions replaced with an amino acid residue that is not encoded by the human germline immunoglobulin sequence. The definition of human antibodies, antibody constructs and binding domains as used herein also contemplates fully human antibodies, which include only non-artificially and/or genetically altered human sequences of antibodies as those can be derived by using technologies or systems such as the Xenomouse. Preferably, a “fully human antibody” does not include amino acid residues not encoded by human germline immunoglobulin sequences.

[0043] In some embodiments, the antibody constructs of the invention are “isolated” or “substantially pure” antibody constructs. “Isolated” or “substantially pure”, when used to describe the antibody constructs disclosed herein, means an antibody construct that has been identified, separated and/or recovered from a component of its production environment. Preferably, the antibody construct is free or substantially free of association with all other components from its production environment. Contaminant components of its production environment, such as that resulting from recombinant transfected cells, are materials that would typically interfere with diagnostic or therapeutic uses for the polypeptide, and may include enzymes, hormones, and other proteinaceous or non-proteinaceous solutes. The antibody constructs may e.g constitute at least about 5%, or at least about 50% by weight of the total protein in a given sample. It is understood that the isolated protein may constitute from 5% to 99.9% by weight of the total protein content, depending on the circumstances. The polypeptide may be made at a significantly higher concentration through the use of an inducible promoter or high expression promoter, such that it is made at increased concentration levels. The definition includes the production of an antibody construct in a wide variety of organisms and/or host cells that are known in the art. In preferred embodiments, the antibody construct will be purified (1) to a degree sufficient to obtain at least 15 residues of N-terminal or internal amino acid sequence by use of a spinning cup sequenator, or (2) to homogeneity by SDS-PAGE under non-reducing or reducing conditions using Coomassie blue or, preferably, silver stain. Ordinarily, however, an isolated antibody construct will be prepared by at least one purification step.

[0044] The term “binding domain” characterizes in connection with the present invention a domain which (specifically) binds to/interacts with/recognizes a given target epitope or a given target side on the target molecules (antigens), here: PSMA and CD3, respectively. The structure and function of the first binding domain (recognizing PSMA), and preferably also the structure and/or function of the second binding domain (recognizing CD3), is/are based on the structure and/or function of an antibody, e.g. of a full-length or whole immunoglobulin molecule, and/or is/are drawn from the variable heavy chain (VH) and/or variable light chain (VL) domains of an antibody or fragment thereof. Preferably the first binding domain is characterized by the presence of three light chain CDRs (i.e. CDR1, CDR2 and CDR3 of the VL region) and/or three heavy chain CDRs (i.e. CDR1, CDR2 and CDR3 of the VH region). The second binding domain preferably also comprises the minimum structural requirements of an antibody which allow for the target binding. More preferably, the second binding domain comprises at least three light chain CDRs (i.e. CDR1, CDR2 and CDR3 of the VL region) and/or three heavy chain CDRs (i.e. CDR1, CDR2 and CDR3 of the VH region). It is envisaged that the first and/or second binding domain is produced by or obtainable by phage-display or library screening methods rather than by grafting CDR sequences from a pre-existing (monoclonal) antibody into a scaffold.

[0045] According to the present invention, binding domains are in the form of one or more polypeptides. Such polypeptides may include proteinaceous parts and non-proteinaceous parts (e.g. chemical linkers or chemical cross-linking agents such as glutaraldehyde). Proteins (including fragments thereof, preferably biologically active fragments, and peptides, usually having less than 30 amino acids) comprise two or more amino acids coupled to each other via a covalent peptide bond (resulting in a chain of amino acids).

[0046] The term “polypeptide” as used herein describes a group of molecules, which usually consist of more than 30 amino acids. Polypeptides may further form multimers such as dimers, trimers and higher oligomers, i.e., consisting of more than one polypeptide molecule. Polypeptide molecules forming such dimers, trimers etc. may be identical or non-identical. The corresponding higher order structures of such multimers are, consequently, termed homo- or heterodimers, homo- or heterotrimers etc. An example for a hereteromultimer is an antibody molecule, which, in its naturally occurring form, consists of two identical light polypeptide chains and two identical heavy polypeptide chains. The terms “peptide”, “polypeptide” and “protein” also refer to naturally modified peptides/polypeptides/proteins wherein the modification is effected e.g. by post-translational modifications like glycosylation, acetylation, phosphorylation and the like. A “peptide”, “polypeptide” or “protein” when referred to herein may also be chemically modified such as pegylated. Such modifications are well known in the art and described herein below.

[0047] Preferably the binding domain which binds to PSMA and/or the binding domain which binds to CD3ε is/are human binding domains. Antibodies and antibody constructs comprising at least one human binding domain avoid some of the problems associated with antibodies or antibody constructs that possess non-human such as rodent (e.g. murine, rat, hamster or rabbit) variable and/or constant regions. The presence of such rodent derived proteins can lead to the rapid clearance of the antibodies or antibody constructs or can lead to the generation of an immune response against the antibody or antibody construct by a patient. In order to avoid the use of rodent derived antibodies or antibody constructs, human or fully human antibodies/antibody constructs can be generated through the introduction of human antibody function into a rodent so that the rodent produces fully human antibodies.

[0048] The ability to clone and reconstruct megabase-sized human loci in YACs and to introduce them into the mouse germline provides a powerful approach to elucidating the functional components of very large or crudely mapped loci as well as generating useful models of human disease. Furthermore, the use of such technology for substitution of mouse loci with their human equivalents could provide unique insights into the expression and regulation of human gene products during development, their communication with other systems, and their involvement in disease induction and progression.

[0049] An important practical application of such a strategy is the “humanization” of the mouse humoral immune system. Introduction of human immunoglobulin (Ig) loci into mice in which the endogenous Ig genes have been inactivated offers the opportunity to study the mechanisms underlying programmed expression and assembly of antibodies as well as their role in B-cell development. Furthermore, such a strategy could provide an ideal source for production of fully human monoclonal antibodies (mAbs)—an important milestone towards fulfilling the promise of antibody therapy in human disease. Fully human antibodies or antibody constructs are expected to minimize the immunogenic and allergic responses intrinsic to mouse or mouse-derivatized mAbs and thus to increase the efficacy and safety of the administered antibodies/antibody constructs. The use of fully human antibodies or antibody constructs can be expected to provide a substantial advantage in the treatment of chronic and recurring human diseases, such as inflammation, autoimmunity, and cancer, which require repeated compound administrations.

[0050] One approach towards this goal was to engineer mouse strains deficient in mouse antibody production with large fragments of the human Ig loci in anticipation that such mice would produce a large repertoire of human antibodies in the absence of mouse antibodies. Large human Ig fragments would preserve the large variable gene diversity as well as the proper regulation of antibody production and expression. By exploiting the mouse machinery for antibody diversification and selection and the lack of immunological tolerance to human proteins, the reproduced human antibody repertoire in these mouse strains should yield high affinity antibodies against any antigen of interest, including human antigens. Using the hybridoma technology, antigen-specific human mAbs with the desired specificity could be readily produced and selected. This general strategy was demonstrated in connection with the generation of the first XenoMouse mouse strains (see Green et al. Nature Genetics 7:13-21 (1994)). The XenoMouse strains were engineered with yeast artificial chromosomes (YACs) containing 245 kb and 190 kb-sized germline configuration fragments of the human heavy chain locus and kappa light chain locus, respectively, which contained core variable and constant region sequences. The human Ig containing YACs proved to be compatible with the mouse system for both rearrangement and expression of antibodies and were capable of substituting for the inactivated mouse Ig genes. This was demonstrated by their ability to induce B cell development, to produce an adult-like human repertoire of fully human antibodies, and to generate antigen-specific human mAbs. These results also suggested that introduction of larger portions of the human Ig loci containing greater numbers of V genes, additional regulatory elements, and human Ig constant regions may recapitulate substantially the full repertoire that is characteristic of the human humoral response to infection and immunization. The work of Green et al. was recently extended to the introduction of greater than approximately 80% of the human antibody repertoire through introduction of megabase sized, germline configuration YAC fragments of the human heavy chain loci and kappa light chain loci, respectively. See Mendez et al. Nature Genetics 15:146-156 (1997) and U.S. patent application Ser. No. 08/759,620.

[0051] The production of the XenoMouse mice is further discussed and delineated in U.S. patent application Ser. No. 07/466,008, Ser. No. 07/610,515, Ser. No. 07/919,297, Ser. No. 07/922,649, Ser. No. 08/031,801, Ser. No. 08/112,848, Ser. No. 08/234,145, Ser. No. 08/376,279, Ser. No. 08/430,938, Ser. No. 08/464,584, Ser. No. 08/464,582, Ser. No. 08/463,191, Ser. No. 08/462,837, Ser. No. 08/486,853, Ser. No. 08/486,857, Ser. No. 08/486,859, Ser. No. 08/462,513, Ser. No. 08/724,752, and Ser. No. 08/759,620; and U.S. Pat. Nos. 6,162,963; 6,150,584; 6,114,598; 6,075,181, and 5,939,598 and Japanese Patent Nos. 3 068 180 B2, 3 068 506 B2, and 3 068 507 B2. See also Mendez et al. Nature Genetics 15:146-156 (1997) and Green and Jakobovits J. Exp. Med. 188:483-495 (1998), EP 0 463 151 B1, WO 94/02602, WO 96/34096, WO 98/24893, WO 00/76310, and WO 03/47336.

[0052] In an alternative approach, others, including GenPharm International, Inc., have utilized a “minilocus” approach. In the minilocus approach, an exogenous Ig locus is mimicked through the inclusion of pieces (individual genes) from the Ig locus. Thus, one or more VH genes, one or more DH genes, one or more JH genes, a mu constant region, and a second constant region (preferably a gamma constant region) are formed into a construct for insertion into an animal. This approach is described in U.S. Pat. No. 5,545,807 to Surani et al. and U.S. Pat. Nos. 5,545,806; 5,625,825; 5,625,126; 5,633,425; 5,661,016; 5,770,429; 5,789,650; 5,814,318; 5,877,397; 5,874,299; and 6,255,458 each to Lonberg and Kay, U.S. Pat. Nos. 5,591,669 and 6,023,010 to Krimpenfort and Berns, U.S. Pat. Nos. 5,612,205; 5,721,367; and U.S. Pat. No. 5,789,215 to Berns et al., and U.S. Pat. No. 5,643,763 to Choi and Dunn, and GenPharm International U.S. patent application Ser. No. 07/574,748, Ser. No. 07/575,962, Ser. No. 07/810,279, Ser. No. 07/853,408, Ser. No. 07/904,068, Ser. No. 07/990,860, Ser. No. 08/053,131, Ser. No. 08/096,762, Ser. No. 08/155,301, Ser. No. 08/161,739, Ser. No. 08/165,699, Ser. No. 08/209,741. See also EP 0 546 073 B1, WO 92/03918, WO 92/22645, WO 92/22647, WO 92/22670, WO 93/12227, WO 94/00569, WO 94/25585, WO 96/14436, WO 97/13852, and WO 98/24884 and U.S. Pat. No. 5,981,175. See further Taylor et al. (1992), Chen et al. (1993), Tuaillon et al. (1993), Choi et al. (1993), Lonberg et al. (1994), Taylor et al. (1994), and Tuaillon et al. (1995), Fishwild et al. (1996).

[0053] Kirin has also demonstrated the generation of human antibodies from mice in which, through microcell fusion, large pieces of chromosomes, or entire chromosomes, have been introduced. See European Patent Application Nos. 773 288 and 843 961. Xenerex Biosciences is developing a technology for the potential generation of human antibodies. In this technology, SCID mice are reconstituted with human lymphatic cells, e.g., B and/or T cells. Mice are then immunized with an antigen and can generate an immune response against the antigen. See U.S. Pat. Nos. 5,476,996; 5,698,767; and 5,958,765.

[0054] Human anti-mouse antibody (HAMA) responses have led the industry to prepare chimeric or otherwise humanized antibodies. It is however expected that certain human anti-chimeric antibody (HACA) responses will be observed, particularly in chronic or multi-dose utilizations of the antibody. Thus, it would be desirable to provide antibody constructs comprising a human binding domain against PSMA and a human binding domain against CD3ε in order to vitiate concerns and/or effects of HAMA or HACA response.

[0055] The terms “(specifically) binds to”, “(specifically) recognizes”, “is (specifically) directed to”, and “(specifically) reacts with” mean in accordance with this invention that a binding domain interacts or specifically interacts with a given epitope or a given target side on the target molecules (antigens), here: PSMA and CD3E, respectively.

[0056] The term “epitope” refers to a side on an antigen to which a binding domain, such as an antibody or immunoglobulin, or a derivative, fragment or variant of an antibody or an immunoglobulin, specifically binds. An “epitope” is antigenic and thus the term epitope is sometimes also referred to herein as “antigenic structure” or “antigenic determinant”. Thus, the binding domain is an “antigen interaction side”. Said binding/interaction is also understood to define a “specific recognition”.

[0057] “Epitopes” can be formed both by contiguous amino acids or non-contiguous amino acids juxtaposed by tertiary folding of a protein. A “linear epitope” is an epitope where an amino acid primary sequence comprises the recognized epitope. A linear epitope typically includes at least 3 or at least 4, and more usually, at least 5 or at least 6 or at least 7, for example, about 8 to about 10 amino acids in a unique sequence.

[0058] A “conformational epitope”, in contrast to a linear epitope, is an epitope wherein the primary sequence of the amino acids comprising the epitope is not the sole defining component of the epitope recognized (e.g., an epitope wherein the primary sequence of amino acids is not necessarily recognized by the binding domain). Typically a conformational epitope comprises an increased number of amino acids relative to a linear epitope. With regard to recognition of conformational epitopes, the binding domain recognizes a three-dimensional structure of the antigen, preferably a peptide or protein or fragment thereof (in the context of the present invention, the antigenic structure for one of the binding domains is comprised within the target cell surface antigen protein). For example, when a protein molecule folds to form a three-dimensional structure, certain amino acids and/or the polypeptide backbone forming the conformational epitope become juxtaposed enabling the antibody to recognize the epitope. Methods of determining the conformation of epitopes include, but are not limited to, x-ray crystallography, two-dimensional nuclear magnetic resonance (2D-NMR) spectroscopy and site-directed spin labelling and electron paramagnetic resonance (EPR) spectroscopy.

[0059] A method for epitope mapping is described in the following: When a region (a contiguous amino acid stretch) in the human PSMA protein is exchanged/replaced with its corresponding region of a non-human and non-primate PSMA (e.g., mouse PSMA, but others like chicken, rat, hamster, rabbit etc. may also be conceivable), a decrease in the binding of the binding domain is expected to occur, unless the binding domain is cross-reactive for the non-human, non-primate PSMA used. Said decrease is preferably at least 10%, 20%, 30%, 40%, or 50%; more preferably at least 60%, 70%, or 80%, and most preferably 90%, 95% or even 100% in comparison to the binding to the respective region in the human PSMA protein, whereby binding to the respective region in the human PSMA protein is set to be 100%. It is envisaged that the aforementioned human PSMA/non-human PSMA chimeras are expressed in CHO cells. It is also envisaged that the human PSMA/non-human PSMA chimeras are fused with a transmembrane domain and/or cytoplasmic domain of a different membrane-bound protein such as EpCAM.

[0060] In an alternative or additional method for epitope mapping, several truncated versions of the human PSMA extracellular domain can be generated in order to determine a specific region that is recognized by a binding domain. In these truncated versions, the different extracellular PSMA domains/sub-domains or regions are stepwise deleted, starting from the N-terminus. It is envisaged that the truncated PSMA versions may be expressed in CHO cells. It is also envisaged that the truncated PSMA versions may be fused with a transmembrane domain and/or cytoplasmic domain of a different membrane-bound protein such as EpCAM. It is also envisaged that the truncated PSMA versions may encompass a signal peptide domain at their N-terminus, for example a signal peptide derived from mouse IgG heavy chain signal peptide. It is furthermore envisaged that the truncated PSMA versions may encompass a v5 domain at their N-terminus (following the signal peptide) which allows verifying their correct expression on the cell surface. A decrease or a loss of binding is expected to occur with those truncated PSMA versions which do not encompass any more the PSMA region that is recognized by the binding domain. The decrease of binding is preferably at least 10%, 20%, 30%, 40%, 50%; more preferably at least 60%, 70%, 80%, and most preferably 90%, 95% or even 100%, whereby binding to the entire human PSMA protein (or its extracellular region or domain) is set to be 100.

[0061] A further method to determine the contribution of a specific residue of PSMA to the recognition by an antibody construct or binding domain is alanine scanning (see e.g. Morrison K L & Weiss G A. Cur Opin Chem Biol. 2001 June; 5(3):302-7), where each residue to be analyzed is replaced by alanine, e.g. via site-directed mutagenesis. Alanine is used because of its non-bulky, chemically inert, methyl functional group that nevertheless mimics the secondary structure references that many of the other amino acids possess. Sometimes bulky amino acids such as valine or leucine can be used in cases where conservation of the size of mutated residues is desired. Alanine scanning is a mature technology which has been used for a long period of time.

[0062] The interaction between the binding domain and the epitope or the region comprising the epitope implies that a binding domain exhibits appreciable affinity for the epitope/the region comprising the epitope on a particular protein or antigen (here: PSMA and CD3, respectively) and, generally, does not exhibit significant reactivity with proteins or antigens other than the PSMA or CD3. “Appreciable affinity” includes binding with an affinity of about 10⁻⁶ M (KD) or stronger. Preferably, binding is considered specific when the binding affinity is about 10⁻¹² to 10⁻⁸ M, 10⁻¹² to 10⁻⁹ M, 10⁻¹² to 10⁻¹⁰ M, 10⁻¹¹ to 10⁻⁸ M, preferably of about 10⁻¹¹ to 10⁻⁹ M. Whether a binding domain specifically reacts with or binds to a target can be tested readily by, inter alia, comparing the reaction of said binding domain with a target protein or antigen with the reaction of said binding domain with proteins or antigens other than the PSMA or CD3. Preferably, a binding domain of the invention does not essentially or substantially bind to proteins or antigens other than PSMA or CD3 (i.e., the first binding domain is not capable of binding to proteins other than PSMA and the second binding domain is not capable of binding to proteins other than CD3). It is an envisaged characteristic of the antibody constructs according to the present invention to have superior affinity characteristics in comparison to other HLE formats. Such a superior affinity, in consequence, suggests a prolonged half-life in vivo. The longer half-life of the antibody constructs according to the present invention may reduce the duration and frequency of administration which typically contributes to improved patient compliance. This is of particular importance as the antibody constructs of the present invention are particularly beneficial for highly weakened or even multimorbide cancer patients.

[0063] The term “does not essentially/substantially bind” or “is not capable of binding” means that a binding domain of the present invention does not bind a protein or antigen other than the PSMA or CD3, i.e., does not show reactivity of more than 30%, preferably not more than 20%, more preferably not more than 10%, particularly preferably not more than 9%, 8%, 7%, 6% or 5% with proteins or antigens other than PSMA or CD3, whereby binding to the PSMA or CD3, respectively, is set to be 100%.

[0064] Specific binding is believed to be effected by specific motifs in the amino acid sequence of the binding domain and the antigen. Thus, binding is achieved as a result of their primary, secondary and/or tertiary structure as well as the result of secondary modifications of said structures. The specific interaction of the antigen-interaction-side with its specific antigen may result in a simple binding of said side to the antigen. Moreover, the specific interaction of the antigen-interaction-side with its specific antigen may alternatively or additionally result in the initiation of a signal, e.g. due to the induction of a change of the conformation of the antigen, an oligomerization of the antigen, etc.

[0065] The term “variable” refers to the portions of the antibody or immunoglobulin domains that exhibit variability in their sequence and that are involved in determining the specificity and binding affinity of a particular antibody (i.e., the “variable domain(s)”). The pairing of a variable heavy chain (VH) and a variable light chain (VL) together forms a single antigen-binding site.

[0066] Variability is not evenly distributed throughout the variable domains of antibodies; it is concentrated in sub-domains of each of the heavy and light chain variable regions. These sub-domains are called “hypervariable regions” or “complementarity determining regions”(CDRs). The more conserved (i.e., non-hypervariable) portions of the variable domains are called the “framework” regions (FRM or FR) and provide a scaffold for the six CDRs in three dimensional space to form an antigen-binding surface. The variable domains of naturally occurring heavy and light chains each comprise four FRM regions (FR1, FR2, FR3, and FR4), largely adopting a β-sheet configuration, connected by three hypervariable regions, which form loops connecting, and in some cases forming part of, the β-sheet structure. The hypervariable regions in each chain are held together in close proximity by the FRM and, with the hypervariable regions from the other chain, contribute to the formation of the antigen-binding side (see Kabat et al., loc. cit.).

[0067] The terms “CDR”, and its plural “CDRs”, refer to the complementarity determining region of which three make up the binding character of a light chain variable region (CDR-L1, CDR-L2 and CDR-L3) and three make up the binding character of a heavy chain variable region (CDR-H1, CDR-H2 and CDR-H3). CDRs contain most of the residues responsible for specific interactions of the antibody with the antigen and hence contribute to the functional activity of an antibody molecule: they are the main determinants of antigen specificity.

[0068] The exact definitional CDR boundaries and lengths are subject to different classification and numbering systems. CDRs may therefore be referred to by Kabat, Chothia, contact or any other boundary definitions, including the numbering system described herein. Despite differing boundaries, each of these systems has some degree of overlap in what constitutes the so called “hypervariable regions” within the variable sequences. CDR definitions according to these systems may therefore differ in length and boundary areas with respect to the adjacent framework region. See for example Kabat (an approach based on cross-species sequence variability), Chothia (an approach based on crystallographic studies of antigen-antibody complexes), and/or MacCallum (Kabat et al., loc. cit.; Chothia et al., J. Mol. Biol, 1987, 196: 901-917; and MacCallum et al., J. Mol. Biol, 1996, 262: 732). Still another standard for characterizing the antigen binding side is the AbM definition used by Oxford Molecular's AbM antibody modeling software. See, e.g., Protein Sequence and Structure Analysis of Antibody Variable Domains. In: Antibody Engineering Lab Manual (Ed.: Duebel, S. and Kontermann, R., Springer-Verlag, Heidelberg). To the extent that two residue identification techniques define regions of overlapping, but not identical regions, they can be combined to define a hybrid CDR. However, the numbering in accordance with the so-called Kabat system is preferred.

[0069] Typically, CDRs form a loop structure that can be classified as a canonical structure. The term “canonical structure” refers to the main chain conformation that is adopted by the antigen binding (CDR) loops. From comparative structural studies, it has been found that five of the six antigen binding loops have only a limited repertoire of available conformations. Each canonical structure can be characterized by the torsion angles of the polypeptide backbone. Correspondent loops between antibodies may, therefore, have very similar three dimensional structures, despite high amino acid sequence variability in most parts of the loops (Chothia and Lesk, J. Mol. Biol., 1987, 196: 901; Chothia et al., Nature, 1989, 342: 877; Martin and Thornton, J. Mol. Biol, 1996, 263: 800). Furthermore, there is a relationship between the adopted loop structure and the amino acid sequences surrounding it. The conformation of a particular canonical class is determined by the length of the loop and the amino acid residues residing at key positions within the loop, as well as within the conserved framework (i.e., outside of the loop). Assignment to a particular canonical class can therefore be made based on the presence of these key amino acid residues.

[0070] The term “canonical structure” may also include considerations as to the linear sequence of the antibody, for example, as catalogued by Kabat (Kabat et al., loc. cit.). The Kabat numbering scheme (system) is a widely adopted standard for numbering the amino acid residues of an antibody variable domain in a consistent manner and is the preferred scheme applied in the present invention as also mentioned elsewhere herein. Additional structural considerations can also be used to determine the canonical structure of an antibody. For example, those differences not fully reflected by Kabat numbering can be described by the numbering system of Chothia et al. and/or revealed by other techniques, for example, crystallography and two- or three-dimensional computational modeling. Accordingly, a given antibody sequence may be placed into a canonical class which allows for, among other things, identifying appropriate chassis sequences (e.g., based on a desire to include a variety of canonical structures in a library). Kabat numbering of antibody amino acid sequences and structural considerations as described by Chothia et al., loc. cit. and their implications for construing canonical aspects of antibody structure, are described in the literature. The subunit structures and three-dimensional configurations of different classes of immunoglobulins are well known in the art. For a review of the antibody structure, see Antibodies: A Laboratory Manual, Cold Spring Harbor Laboratory, eds. Harlow et al., 1988.

[0071] The CDR3 of the light chain and, particularly, the CDR3 of the heavy chain may constitute the most important determinants in antigen binding within the light and heavy chain variable regions. In some antibody constructs, the heavy chain CDR3 appears to constitute the major area of contact between the antigen and the antibody. In vitro selection schemes in which CDR3 alone is varied can be used to vary the binding properties of an antibody or determine which residues contribute to the binding of an antigen. Hence, CDR3 is typically the greatest source of molecular diversity within the antibody-binding side. H3, for example, can be as short as two amino acid residues or greater than 26 amino acids.

[0072] In a classical full-length antibody or immunoglobulin, each light (L) chain is linked to a heavy (H) chain by one covalent disulfide bond, while the two H chains are linked to each other by one or more disulfide bonds depending on the H chain isotype. The CH domain most proximal to VH is usually designated as CH1. The constant (“C”) domains are not directly involved in antigen binding, but exhibit various effector functions, such as antibody-dependent, cell-mediated cytotoxicity and complement activation. The Fc region of an antibody is comprised within the heavy chain constant domains and is for example able to interact with cell surface located Fc receptors.

[0073] The sequence of antibody genes after assembly and somatic mutation is highly varied, and these varied genes are estimated to encode 10¹⁰ different antibody molecules (Immunoglobulin Genes, 2^{nd} ed., eds. Jonio et al., Academic Press, San Diego, Calif., 1995). Accordingly, the immune system provides a repertoire of immunoglobulins. The term “repertoire” refers to at least one nucleotide sequence derived wholly or partially from at least one sequence encoding at least one immunoglobulin. The sequence(s) may be generated by rearrangement in vivo of the V, D, and J segments of heavy chains, and the V and J segments of light chains. Alternatively, the sequence(s) can be generated from a cell in response to which rearrangement occurs, e.g., in vitro stimulation. Alternatively, part or all of the sequence(s) may be obtained by DNA splicing, nucleotide synthesis, mutagenesis, and other methods, see, e.g., U.S. Pat. No. 5,565,332. A repertoire may include only one sequence or may include a plurality of sequences, including ones in a genetically diverse collection.

[0074] The term “Fc portion” or “Fc monomer” means in connection with this invention a polypeptide comprising at least one domain having the function of a CH2 domain and at least one domain having the function of a CH3 domain of an immunoglobulin molecule. As apparent from the term “Fc monomer”, the polypeptide comprising those CH domains is a “polypeptide monomer”. An Fc monomer can be a polypeptide comprising at least a fragment of the constant region of an immunoglobulin excluding the first constant region immunoglobulin domain of the heavy chain (CH1), but maintaining at least a functional part of one CH2 domain and a functional part of one CH3 domain, wherein the CH2 domain is amino terminal to the CH3 domain. In a preferred aspect of this definition, an Fc monomer can be a polypeptide constant region comprising a portion of the Ig-Fc hinge region, a CH2 region and a CH3 region, wherein the hinge region is amino terminal to the CH2 domain. It is envisaged that the hinge region of the present invention promotes dimerization. Such Fc polypeptide molecules can be obtained by papain digestion of an immunoglobulin region (of course resulting in a dimer of two Fc polypeptide), for example and not limitation. In another aspect of this definition, an Fc monomer can be a polypeptide region comprising a portion of a CH2 region and a CH3 region. Such Fc polypeptide molecules can be obtained by pepsin digestion of an immunoglobulin molecule, for example and not limitation. In one embodiment, the polypeptide sequence of an Fc monomer is substantially similar to an Fc polypeptide sequence of: an IgG₁ Fc region, an IgG₂ Fc region, an IgG₃ Fc region, an IgG₄ Fc region, an IgM Fc region, an IgA Fc region, an IgD Fc region and an IgE Fc region. (See, e.g., Padlan, Molecular Immunology, 31(3), 169-217 (1993)). Because there is some variation between immunoglobulins, and solely for clarity, Fc monomer refers to the last two heavy chain constant region immunoglobulin domains of IgA, IgD, and IgG, and the last three heavy chain constant region immunoglobulin domains of IgE and IgM. As mentioned, the Fc monomer can also include the flexible hinge N-terminal to these domains. For IgA and IgM, the Fc monomer may include the J chain. For IgG, the Fc portion comprises immunoglobulin domains CH2 and CH3 and the hinge between the first two domains and CH2. Although the boundaries of the Fc portion may vary an example for a human IgG heavy chain Fc portion comprising a functional hinge, CH2 and CH3 domain can be defined e.g. to comprise residues D231 (of the hinge domain—corresponding to D234 in Table 1 below) to P476, respectively L476 (for IgG₄) of the carboxyl-terminus of the CH3 domain, wherein the numbering is according to Kabat. The two Fc portion or Fc monomer, which are fused to each other via a peptide linker define the third domain of the antibody construct of the invention, which may also be defined as scFc domain.

[0075] In one embodiment of the invention it is envisaged that a scFc domain as disclosed herein, respectively the Fc monomers fused to each other are comprised only in the third domain of the antibody construct.

[0076] In line with the present invention an IgG hinge region can be identified by analogy using the Kabat numbering as set forth in Table 1. In line with the above, the minimal requirement it is envisaged that for a hinge domain/region of the present invention in line with the present invention are comprises the amino acid residues corresponding to the IgG1 sequence stretch of D231 D234 to P243 according to the Kabat numbering. It is likewise envisaged that a hinge domain/region of the present invention comprises or consists of the IgG1 hinge sequence DKTHTCPPCP (SEQ ID NO: 477) (corresponding to the stretch D234 to P243 as shown in Table 1 below—variations of said sequence are also envisaged provided that the hinge region still promotes dimerization). In a preferred embodiment of the invention the glycosylation site at Kabat position 314 of the CH2 domains in the third domain of the antibody construct is removed by a N314X substitution, wherein X is any amino acid excluding Q. Said substitution is preferably a N314G substitution. In a more preferred embodiment, said CH2 domain additionally comprises the following substitutions (position according to Kabat) V321C and R3090 (these substitutions introduce the intra domain cysteine disulfide bridge at Kabat positions 309 and 321).

[0077] It is also envisaged that the third domain of the antibody construct of the invention comprises or consists in an amino to carboxyl order: DKTHTCPPCP (SEQ ID NO: 477) (i.e. hinge) —CH2-CH3-linker-DKTHTCPPCP (SEQ ID NO: 477) (i.e. hinge) —CH2-CH3. The peptide linker of the aforementioned antibody construct is in a preferred embodiment characterized by the amino acid sequence Gly-Gly-Gly-Gly-Ser, i.e. Gly4Ser (SEQ ID NO: 1), or polymers thereof, i.e. (Gly4Ser)x, where x is an integer of 5 or greater (e.g. 5, 6, 7, 8 etc. or greater), 6 being preferred ((Gly4Ser)6). Said construct may further comprise the aforementioned substitutions N314X, preferably N314G, and/or the further substitutions V321C and R309C. In a preferred embodiment of the antibody constructs of the invention as defined herein before, it is envisaged that the second domain binds to an extracellular epitope of the human and/or the Macaca CD3ε chain.

TABLE 1
Kabat numbering of the amino acid residues of the hinge region

| IMGT numbering | IgG₁ amino acid | Kabat |
|---|---|---|
| for the hinge | translation | numbering |
| 1 | (E) | 226 |
| 2 | P | 227 |
| 3 | K | 228 |
| 4 | S | 232 |
| 5 | C | 233 |
| 6 | D | 234 |
| 7 | K | 235 |
| 8 | T | 236 |
| 9 | H | 237 |
| 10 | T | 238 |
| 11 | C | 239 |
| 12 | P | 240 |
| 13 | P | 241 |
| 14 | C | 242 |
| 15 | P | 243 |

[0078] In further embodiments of the present invention, the hinge domain/region comprises or consists of the IgG2 subtype hinge sequence ERKCCVECPPCP (SEQ ID NO: 478), the IgG3 subtype hinge sequence ELKTPLDTTHTCPRCP (SEQ ID NO: 479) or ELKTPLGDTTHTCPRCP (SEQ ID NO: 486), and/or the IgG4 subtype hinge sequence ESKYGPPCPSCP (SEQ ID NO: 480). The IgG1 subtype hinge sequence may be the following one EPKSCDKTHTCPPCP (as shown in Table 1 and SEQ ID NO: 487). These core hinge regions are thus also envisaged in the context of the present invention.

[0079] The location and sequence of the IgG CH2 and IgG CD3 domain can be identified by analogy using the Kabat numbering as set forth in Table 2:

TABLE 2
Kabat numbering of the amino acid residues
of the IgG CH2 and CH3 region

| IgG | CH2 aa | CH2 Kabat | CH3 aa | CH3 Kabat |
|---|---|---|---|---|
| subtype | translation | numbering | translation | numbering |
| IgG₁ | APE . . . KAK | 244 . . . 360 | GQP . . . PGK | 361 . . . 478 |
| IgG₂ | APP . . . KTK | 244 . . . 360 | GQP . . . PGK | 361 . . . 478 |
| IgG₃ | APE . . . KTK | 244 . . . 360 | GQP . . . PGK | 361 . . . 478 |
| IgG₄ | APE . . . KAK | 244 . . . 360 | GQP . . . LGK | 361 . . . 478 |

[0080] In one embodiment of the invention the emphasized bold amino acid residues in the CH3 domain of the first or both Fc monomers are deleted.

[0081] The peptide linker, by whom the polypeptide monomers (“Fc portion” or “Fc monomer”) of the third domain are fused to each other, preferably comprises at least 25 amino acid residues (25, 26, 27, 28, 29, 30 etc.). More preferably, this peptide linker comprises at least 30 amino acid residues (30, 31, 32, 33, 34, 35 etc.). It is also preferred that the linker comprises up to 40 amino acid residues, more preferably up to 35 amino acid residues, most preferably exactly 30 amino acid residues. A preferred embodiment of such peptide linker is characterized by the amino acid sequence Gly-Gly-Gly-Gly-Ser, i.e. Gly₄Ser (SEQ ID NO: 1), or polymers thereof, i.e. (Gly₄Ser)x, where x is an integer of 5 or greater (e.g. 6, 7 or 8). Preferably the integer is 6 or 7, more preferably the integer is 6.

[0082] In the event that a linker is used to fuse the first domain to the second domain, or the first or second domain to the third domain, this linker is preferably of a length and sequence sufficient to ensure that each of the first and second domains can, independently from one another, retain their differential binding specificities. For peptide linkers which connect the at least two binding domains (or two variable domains) in the antibody construct of the invention, those peptide linkers are preferred which comprise only a few number of amino acid residues, e.g. 12 amino acid residues or less. Thus, peptide linkers of 12, 11, 10, 9, 8, 7, 6 or 5 amino acid residues are preferred. An envisaged peptide linker with less than 5 amino acids comprises 4, 3, 2 or one amino acid(s), wherein Gly-rich linkers are preferred. A preferred embodiment of the peptide linker for a fusion the first and the second domain is depicted in SEQ ID NO:1. A preferred linker embodiment of the peptide linker for fusing the second and the third domain is a (Gly)₄-linker, also called G₄-linker.

[0083] A particularly preferred “single” amino acid in the context of one of the above described “peptide linker” is Gly. Accordingly, said peptide linker may consist of the single amino acid Gly. In a preferred embodiment of the invention a peptide linker is characterized by the amino acid sequence Gly-Gly-Gly-Gly-Ser, i.e. Gly₄Ser (SEQ ID NO: 1), or polymers thereof, i.e. (Gly₄Ser)x, where x is an integer of 1 or greater (e.g. 2 or 3). Preferred linkers are depicted in SEQ ID NOs: 1 to 12. The characteristics of said peptide linker, which comprise the absence of the promotion of secondary structures, are known in the art and are described e.g. in Dall'Acqua et al. (Biochem. (1998) 37, 9266-9273), Cheadle et al. (Mol Immunol (1992) 29, 21-30) and Raag and Whitlow (FASEB (1995) 9(1), 73-80). Peptide linkers which furthermore do not promote any secondary structures are preferred. The linkage of said domains to each other can be provided, e.g., by genetic engineering, as described in the examples. Methods for preparing fused and operatively linked bispecific single chain constructs and expressing them in mammalian cells or bacteria are well-known in the art (e.g. WO 99/54440 or Sambrook et al., Molecular Cloning: A Laboratory Manual, Cold Spring Harbor Laboratory Press, Cold Spring Harbor, N.Y., 2001).

[0084] In a preferred embodiment of the antibody construct or the present invention the first and second domain form an antibody construct in a format selected from the group consisting of (scFv)₂, scFv-single domain mAb, diabody and oligomers of any of the those formats.

[0085] According to a particularly preferred embodiment, and as documented in the appended examples, the first and the second domain of the antibody construct of the invention is a “bispecific single chain antibody construct”, more preferably a bispecific “single chain Fv” (scFv). Although the two domains of the Fv fragment, VL and VH, are coded for by separate genes, they can be joined, using recombinant methods, by a synthetic linker—as described hereinbefore—that enables them to be made as a single protein chain in which the VL and VH regions pair to form a monovalent molecule; see e.g., Huston et al. (1988) Proc. Natl. Acad. Sci USA 85:5879-5883). These antibody fragments are obtained using conventional techniques known to those with skill in the art, and the fragments are evaluated for function in the same manner as are whole or full-length antibodies. A single-chain variable fragment (scFv) is hence a fusion protein of the variable region of the heavy chain (VH) and of the light chain (VL) of immunoglobulins, usually connected with a short linker peptide of about ten to about 25 amino acids, preferably about 15 to 20 amino acids. The linker is usually rich in glycine for flexibility, as well as serine or threonine for solubility, and can either connect the N-terminus of the VH with the C-terminus of the VL, or vice versa. This protein retains the specificity of the original immunoglobulin, despite removal of the constant regions and introduction of the linker.

[0086] Bispecific single chain antibody constructs are known in the art and are described in WO 99/54440, Mack, J. Immunol. (1997), 158, 3965-3970, Mack, PNAS, (1995), 92, 7021-7025, Kufer, Cancer Immunol. Immunother., (1997), 45, 193-197, Löffler, Blood, (2000), 95, 6, 2098-2103, Brühl, Immunol., (2001), 166, 2420-2426, Kipriyanov, J. Mol. Biol., (1999), 293, 41-56. Techniques described for the production of single chain antibodies (see, inter alia, U.S. Pat. No. 4,946,778, Kontermann and Dübel (2010), loc. cit. and Little (2009), loc. cit.) can be adapted to produce single chain antibody constructs specifically recognizing (an) elected target(s).

[0087] Bivalent (also called divalent) or bispecific single-chain variable fragments (bi-scFvs or di-scFvs having the format (scFv)₂ can be engineered by linking two scFv molecules (e.g. with linkers as described hereinbefore). If these two scFv molecules have the same binding specificity, the resulting (scFv)₂ molecule will preferably be called bivalent (i.e. it has two valences for the same target epitope). If the two scFv molecules have different binding specificities, the resulting (scFv)₂ molecule will preferably be called bispecific. The linking can be done by producing a single peptide chain with two VH regions and two VL regions, yielding tandem scFvs (see e.g. Kufer P. et al., (2004) Trends in Biotechnology 22(5):238-244). Another possibility is the creation of scFv molecules with linker peptides that are too short for the two variable regions to fold together (e.g. about five amino acids), forcing the scFvs to dimerize. This type is known as diabodies (see e.g. Hollinger, Philipp et al., (July 1993) Proceedings of the National Academy of Sciences of the United States of America 90 (14): 6444-8).

[0088] In line with this invention either the first, the second or the first and the second domain may comprise a single domain antibody, respectively the variable domain or at least the CDRs of a single domain antibody. Single domain antibodies comprise merely one (monomeric) antibody variable domain which is able to bind selectively to a specific antigen, independently of other V regions or domains. The first single domain antibodies were engineered from heavy chain antibodies found in camelids, and these are called V_{H}H fragments. Cartilaginous fishes also have heavy chain antibodies (IgNAR) from which single domain antibodies called V_{NAR} fragments can be obtained. An alternative approach is to split the dimeric variable domains from common immunoglobulins e.g. from humans or rodents into monomers, hence obtaining VH or VL as a single domain Ab. Although most research into single domain antibodies is currently based on heavy chain variable domains, nanobodies derived from light chains have also been shown to bind specifically to target epitopes. Examples of single domain antibodies are called sdAb, nanobodies or single variable domain antibodies.

[0089] A (single domain mAb)₂ is hence a monoclonal antibody construct composed of (at least) two single domain monoclonal antibodies, which are individually selected from the group comprising V_{H}, V_{L}, V_{H}H and V_{NAR}. The linker is preferably in the form of a peptide linker. Similarly, an “scFv-single domain mAb” is a monoclonal antibody construct composed of at least one single domain antibody as described above and one scFv molecule as described above. Again, the linker is preferably in the form of a peptide linker.

[0090] Whether or not an antibody construct competes for binding with another given antibody construct can be measured in a competition assay such as a competitive ELISA or a cell-based competition assay. Avidin-coupled microparticles (beads) can also be used. Similar to an avidin-coated ELISA plate, when reacted with a biotinylated protein, each of these beads can be used as a substrate on which an assay can be performed. Antigen is coated onto a bead and then precoated with the first antibody. The second antibody is added and any additional binding is determined. Possible means for the read-out includes flow cytometry.

[0091] T cells or T lymphocytes are a type of lymphocyte (itself a type of white blood cell) that play a central role in cell-mediated immunity. There are several subsets of T cells, each with a distinct function. T cells can be distinguished from other lymphocytes, such as B cells and NK cells, by the presence of a T cell receptor (TCR) on the cell surface. The TCR is responsible for recognizing antigens bound to major histocompatibility complex (MHC) molecules and is composed of two different protein chains. In 95% of the T cells, the TCR consists of an alpha (a) and beta (13) chain. When the TCR engages with antigenic peptide and MHC (peptide/MHC complex), the T lymphocyte is activated through a series of biochemical events mediated by associated enzymes, co-receptors, specialized adaptor molecules, and activated or released transcription factors.

[0092] The CD3 receptor complex is a protein complex and is composed of four chains. In mammals, the complex contains a CD3γ (gamma) chain, a CD3δ (delta) chain, and two CD3ε (epsilon) chains. These chains associate with the T cell receptor (TCR) and the so-called ζ (zeta) chain to form the T cell receptor CD3 complex and to generate an activation signal in T lymphocytes. The CD3γ (gamma), CD3δ (delta), and CD3ε (epsilon) chains are highly related cell-surface proteins of the immunoglobulin superfamily containing a single extracellular immunoglobulin domain. The intracellular tails of the CD3 molecules contain a single conserved motif known as an immunoreceptor tyrosine-based activation motif or ITAM for short, which is essential for the signaling capacity of the TCR. The CD3 epsilon molecule is a polypeptide which in humans is encoded by the CD3ε gene which resides on chromosome 11. The most preferred epitope of CD3 epsilon is comprised within amino acid residues 1-27 of the human CD3 epsilon extracellular domain. It is envisaged that antibody constructs according to the present invention typically and advantageously show less unspecific T cell activation, which is not desired in specific immunotherapy. This translates to a reduced risk of side effects.

[0093] The redirected lysis of target cells via the recruitment of T cells by a multispecific, at least bispecific, antibody construct involves cytolytic synapse formation and delivery of perforin and granzymes. The engaged T cells are capable of serial target cell lysis, and are not affected by immune escape mechanisms interfering with peptide antigen processing and presentation, or clonal T cell differentiation; see, for example, WO 2007/042261.

[0094] Cytotoxicity mediated by antibody constructs of the invention can be measured in various ways. Effector cells can be e.g. stimulated enriched (human) CD8 positive T cells or unstimulated (human) peripheral blood mononuclear cells (PBMC). If the target cells are of macaque origin or express or are transfected with macaque PSMA which is bound by the first domain, the effector cells should also be of macaque origin such as a macaque T cell line, e.g. 4119LnPx. The target cells should express (at least the extracellular domain of) PSMA, e.g. human or macaque PSMA. Target cells can be a cell line (such as CHO) which is stably or transiently transfected with PSMA, e.g. human or macaque PSMA. Usually EC₅₀ values are expected to be lower with target cell lines expressing higher levels of PSMA on the cell surface. The effector to target cell (E:T) ratio is usually about 10:1, but can also vary. Cytotoxic activity of PSMA×CD3 bispecific antibody constructs can be measured in a ⁵¹Cr-release assay (incubation time of about 18 hours) or in a in a FACS-based cytotoxicity assay (incubation time of about 48 hours). Modifications of the assay incubation time (cytotoxic reaction) are also possible. Other methods of measuring cytotoxicity are well-known to the skilled person and comprise MTT or MTS assays, ATP-based assays including bioluminescent assays, the sulforhodamine B (SRB) assay, WST assay, clonogenic assay and the ECIS technology.

[0095] The cytotoxic activity mediated by PSMA×CD3 bispecific antibody constructs of the present invention is preferably measured in a cell-based cytotoxicity assay. It may also be measured in a ⁵¹Cr-release assay. It is represented by the EC₅₀ value, which corresponds to the half maximal effective concentration (concentration of the antibody construct which induces a cytotoxic response halfway between the baseline and maximum). Preferably, the EC₅₀ value of the PSMA×CD3 bispecific antibody constructs is ≦5000 pM or ≦4000 pM, more preferably ≦3000 pM or ≦2000 pM, even more preferably ≦1000 pM or ≦500 pM, even more preferably ≦400 pM or ≦300 pM, even more preferably ≦200 pM, even more preferably ≦100 pM, even more preferably ≦50 pM, even more preferably ≦20 pM or ≦0 pM, and most preferably ≦5 pM.

[0096] The above given EC₅₀ values can be measured in different assays. The skilled person is aware that an EC₅₀ value can be expected to be lower when stimulated/enriched CD8⁺ T cells are used as effector cells, compared with unstimulated PBMC. It can furthermore be expected that the EC₅₀ values are lower when the target cells express a high number of PSMA compared with a low target expression rat. For example, when stimulated/enriched human CD8⁺ T cells are used as effector cells (and either PSMA transfected cells such as CHO cells or PSMA positive human cell lines are used as target cells), the EC₅₀ value of the PSMA×CD3 bispecific antibody construct is preferably ≦1000 pM, more preferably ≦500 pM, even more preferably ≦250 pM, even more preferably ≦100 pM, even more preferably ≦50 pM, even more preferably ≦10 pM, and most preferably ≦5 pM. When human PBMCs are used as effector cells, the EC₅₀ value of the PSMA×CD3 bispecific antibody construct is preferably ≦5000 pM or ≦4000 pM (in particular when the target cells are PSMA positive human cell lines), more preferably ≦2000 pM (in particular when the target cells are PSMA transfected cells such as CHO cells), more preferably ≦1000 pM or ≦500 pM, even more preferably ≦200 pM, even more preferably ≦150 pM, even more preferably ≦100 pM, and most preferably ≦50 pM, or lower. When a macaque T cell line such as LnP×4119 is used as effector cells, and a macaque PSMA transfected cell line such as CHO cells is used as target cell line, the EC₅₀ value of the PSMA×CD3 bispecific antibody construct is preferably ≦2000 pM or ≦1500 pM, more preferably ≦1000 pM or ≦500 pM, even more preferably ≦300 pM or ≦250 pM, even more preferably ≦100 pM, and most preferably ≦50 pM.

[0097] Preferably, the PSMA×CD3 bispecific antibody constructs of the present invention do not induce/mediate lysis or do not essentially induce/mediate lysis of PSMA negative cells such as CHO cells. The term “do not induce lysis”, “do not essentially induce lysis”, “do not mediate lysis” or “do not essentially mediate lysis” means that an antibody construct of the present invention does not induce or mediate lysis of more than 30%, preferably not more than 20%, more preferably not more than 10%, particularly preferably not more than 9%, 8%, 7%, 6% or 5% of PSMA negative cells, whereby lysis of a PSMA positive human cell line is set to be 100%. This usually applies for concentrations of the antibody construct of up to 500 nM. The skilled person knows how to measure cell lysis without further ado. Moreover, the present specification teaches specific instructions how to measure cell lysis.

[0098] The difference in cytotoxic activity between the monomeric and the dimeric isoform of individual PSMA×CD3 bispecific antibody constructs is referred to as “potency gap”. This potency gap can e.g. be calculated as ratio between EC₅₀ values of the molecule's monomeric and dimeric form. Potency gaps of the PSMA×CD3 bispecific antibody constructs of the present invention are preferably ≦5, more preferably ≦4, even more preferably ≦3, even more preferably ≦2 and most preferably ≦1.

[0099] The first and/or the second (or any further) binding domain(s) of the antibody construct of the invention is/are preferably cross-species specific for members of the mammalian order of primates. Cross-species specific CD3 binding domains are, for example, described in WO 2008/119567. According to one embodiment, the first and/or second binding domain, in addition to binding to human PSMA and human CD3, respectively, will also bind to PSMA/CD3 of primates including (but not limited to) new world primates (such as Callithrix jacchus, Saguinus Oedipus or Saimiri sciureus), old world primates (such baboons and macaques), gibbons, and non-human homininae.

[0100] In one embodiment of the antibody construct of the invention the first domain binds to human PSMA and further binds to macaque PSMA, such as PSMA of Macaca fascicularis, and more preferably, to macaque PSMA expressed on the surface macaque cells. The affinity of the first domain for PSMA, preferably for human PSMA, is preferably ≦100 nM or 550 nM, more preferably ≦25 nM or ≦20 nM, more preferably ≦15 nM or ≦10 nM, even more preferably ≦5 nM, even more preferably ≦2.5 nM or ≦2 nM, even more preferably ≦1 nM, even more preferably ≦0.6 nM, even more preferably 50.5 nM, and most preferably ≦0.4 nM. The affinity can be measured for example in a BIAcore assay or in a Scatchard assay. Other methods of determining the affinity are also well-known to the skilled person. The affinity of the first domain for macaque PSMA is preferably ≦15 nM, more preferably ≦10 nM, even more preferably ≦5 nM, even more preferably ≦1 nM, even more preferably 50.5 nM, even more preferably ≦0.1 nM, and most preferably 50.05 nM or even 50.01 nM.

[0101] Preferably the affinity gap of the antibody constructs according to the invention for binding macaque PSMA versus human PSMA [ma PSMA:hu PSMA] (as determined e.g. by BiaCore or by Scatchard analysis) is <100, preferably <20, more preferably <15, further preferably <10, even more preferably <8, more preferably <6 and most preferably <2. Preferred ranges for the affinity gap of the antibody constructs according to the invention for binding macaque PSMA versus human PSMA are between 0.1 and 20, more preferably between 0.2 and 10, even more preferably between 0.3 and 6, even more preferably between 0.5 and 3 or between 0.5 and 2.5, and most preferably between 0.5 and 2 or between 0.6 and 2.

[0102] The second domain of the antibody construct of the invention binds to human CD3 epsilon and/or to Macaca CD3 epsilon. In a preferred embodiment the second domain further binds to Callithrix jacchus, Saguinus Oedipus or Saimiri sciureus CD3 epsilon. Callithrix jacchus and Saguinus oedipus are both new world primate belonging to the family of Callitrichidae, while Saimiri sciureus is a new world primate belonging to the family of Cebidae.

[0103] It is preferred for the antibody construct of the present invention that the second domain which binds to an extracellular epitope of the human and/or the Macaca CD3 epsilon chain comprises a VL region comprising CDR-L1, CDR-L2 and CDR-L3 selected from:

(a) CDR-L1 as depicted in SEQ ID NO: 27 of WO 2008/119567, CDR-L2 as depicted in SEQ ID NO: 28 of WO 2008/119567 and CDR-L3 as depicted in SEQ ID NO: 29 of WO 2008/119567;
(b) CDR-L1 as depicted in SEQ ID NO: 117 of WO 2008/119567, CDR-L2 as depicted in SEQ ID NO: 118 of WO 2008/119567 and CDR-L3 as depicted in SEQ ID NO: 119 of WO 2008/119567; and
(c) CDR-L1 as depicted in SEQ ID NO: 153 of WO 2008/119567, CDR-L2 as depicted in SEQ ID NO: 154 of WO 2008/119567 and CDR-L3 as depicted in SEQ ID NO: 155 of WO 2008/119567.

[0104] In a furthermore preferred embodiment of the antibody construct of the present invention, the second domain which binds to an extracellular epitope of the human and/or the Macaca CD3 epsilon chain comprises a VH region comprising CDR-H1, CDR-H2 and CDR-H3 selected from:

(a) CDR-H1 as depicted in SEQ ID NO: 12 of WO 2008/119567, CDR-H2 as depicted in SEQ ID NO: 13 of WO 2008/119567 and CDR-H3 as depicted in SEQ ID NO: 14 of WO 2008/119567;
(b) CDR-H1 as depicted in SEQ ID NO: 30 of WO 2008/119567, CDR-H2 as depicted in SEQ ID NO: 31 of WO 2008/119567 and CDR-H3 as depicted in SEQ ID NO: 32 of WO 2008/119567;
(c) CDR-H1 as depicted in SEQ ID NO: 48 of WO 2008/119567, CDR-H2 as depicted in SEQ ID NO: 49 of WO 2008/119567 and CDR-H3 as depicted in SEQ ID NO: 50 of WO 2008/119567;
(d) CDR-H1 as depicted in SEQ ID NO: 66 of WO 2008/119567, CDR-H2 as depicted in SEQ ID NO: 67 of WO 2008/119567 and CDR-H3 as depicted in SEQ ID NO: 68 of WO 2008/119567;
(e) CDR-H1 as depicted in SEQ ID NO: 84 of WO 2008/119567, CDR-H2 as depicted in SEQ ID NO: 85 of WO 2008/119567 and CDR-H3 as depicted in SEQ ID NO: 86 of WO 2008/119567;
(f) CDR-H1 as depicted in SEQ ID NO: 102 of WO 2008/119567, CDR-H2 as depicted in SEQ ID NO: 103 of WO 2008/119567 and CDR-H3 as depicted in SEQ ID NO: 104 of WO 2008/119567;
(g) CDR-H1 as depicted in SEQ ID NO: 120 of WO 2008/119567, CDR-H2 as depicted in SEQ ID NO: 121 of WO 2008/119567 and CDR-H3 as depicted in SEQ ID NO: 122 of WO 2008/119567;
(h) CDR-H1 as depicted in SEQ ID NO: 138 of WO 2008/119567, CDR-H2 as depicted in SEQ ID NO: 139 of WO 2008/119567 and CDR-H3 as depicted in SEQ ID NO: 140 of WO 2008/119567;
(i) CDR-H1 as depicted in SEQ ID NO: 156 of WO 2008/119567, CDR-H2 as depicted in SEQ ID NO: 157 of WO 2008/119567 and CDR-H3 as depicted in SEQ ID NO: 158 of WO 2008/119567; and
(j) CDR-H1 as depicted in SEQ ID NO: 174 of WO 2008/119567, CDR-H2 as depicted in SEQ ID NO: 175 of WO 2008/119567 and CDR-H3 as depicted in SEQ ID NO: 176 of WO 2008/119567.

[0105] In a preferred embodiment of the antibody construct of the invention the above described three groups of VL CDRs are combined with the above described ten groups of VH CDRs within the second binding domain to form (30) groups, each comprising CDR-L 1-3 and CDR-H 1-3.

[0106] It is preferred for the antibody construct of the present invention that the second domain which binds to CD3 comprises a VL region selected from the group consisting of those depicted in SEQ ID NOs: 17, 21, 35, 39, 53, 57, 71, 75, 89, 93, 107, 111, 125, 129, 143, 147, 161, 165, 179 or 183 of WO 2008/119567 or as depicted in SEQ ID NO: 13.

[0107] It is also preferred that the second domain which binds to CD3 comprises a VH region selected from the group consisting of those depicted in SEQ ID NO: 15, 19, 33, 37, 51, 55, 69, 73, 87, 91, 105, 109, 123, 127, 141, 145, 159, 163, 177 or 181 of WO 2008/119567 or as depicted in SEQ ID NO: 14.

[0108] More preferably, the antibody construct of the present invention is characterized by a second domain which binds to CD3 comprising a VL region and a VH region selected from the group consisting of:

(a) a VL region as depicted in SEQ ID NO: 17 or 21 of WO 2008/119567 and a VH region as depicted in SEQ ID NO: 15 or 19 of WO 2008/119567;
(b) a VL region as depicted in SEQ ID NO: 35 or 39 of WO 2008/119567 and a VH region as depicted in SEQ ID NO: 33 or 37 of WO 2008/119567;
(c) a VL region as depicted in SEQ ID NO: 53 or 57 of WO 2008/119567 and a VH region as depicted in SEQ ID NO: 51 or 55 of WO 2008/119567;
(d) a VL region as depicted in SEQ ID NO: 71 or 75 of WO 2008/119567 and a VH region as depicted in SEQ ID NO: 69 or 73 of WO 2008/119567;
(e) a VL region as depicted in SEQ ID NO: 89 or 93 of WO 2008/119567 and a VH region as depicted in SEQ ID NO: 87 or 91 of WO 2008/119567;
(f) a VL region as depicted in SEQ ID NO: 107 or 111 of WO 2008/119567 and a VH region as depicted in SEQ ID NO: 105 or 109 of WO 2008/119567;
(g) a VL region as depicted in SEQ ID NO: 125 or 129 of WO 2008/119567 and a VH region as depicted in SEQ ID NO: 123 or 127 of WO 2008/119567;
(h) a VL region as depicted in SEQ ID NO: 143 or 147 of WO 2008/119567 and a VH region as depicted in SEQ ID NO: 141 or 145 of WO 2008/119567;
(i) a VL region as depicted in SEQ ID NO: 161 or 165 of WO 2008/119567 and a VH region as depicted in SEQ ID NO: 159 or 163 of WO 2008/119567; and
(j) a VL region as depicted in SEQ ID NO: 179 or 183 of WO 2008/119567 and a VH region as depicted in SEQ ID NO: 177 or 181 of WO 2008/119567.

[0109] Also preferred in connection with the antibody construct of the present invention is a second domain which binds to CD3 comprising a VL region as depicted in SEQ ID NO: 13 and a VH region as depicted in SEQ ID NO: 14.

[0110] According to a preferred embodiment of the antibody construct of the present invention, the first and/or the second domain have the following format: The pairs of VH regions and VL regions are in the format of a single chain antibody (scFv). The VH and VL regions are arranged in the order VH-VL or VL-VH. It is preferred that the VH-region is positioned N-terminally of a linker sequence, and the VL-region is positioned C-terminally of the linker sequence.

[0111] A preferred embodiment of the above described antibody construct of the present invention is characterized by the second domain which binds to CD3 comprising an amino acid sequence selected from the group consisting of SEQ ID NOs: 23, 25, 41, 43, 59, 61, 77, 79, 95, 97, 113, 115, 131, 133, 149, 151, 167, 169, 185 or 187 of WO 2008/119567 or as depicted in SEQ ID NO: 15.

[0112] It is also envisaged that the first binding domain of the antibody construct of the invention comprises a VL region comprising CDR-L1, CDR-L2 and CDR-L3, and a VH region comprising CDR-H1, CDR-H2 and CDR-3 selected from the group consisting of:

(a) CDR-L1 as depicted in SEQ ID NO: 45, CDR-L2 as depicted in SEQ ID NO: 46, CDR-L3 as depicted in SEQ ID NO: 47, CDR-H1 as depicted in SEQ ID NO: 42, CDR-H2 as depicted in SEQ ID NO: 43, and CDR-H3 as depicted in SEQ ID NO: 44
(b) CDR-L1 as depicted in SEQ ID NO: 63, CDR-L2 as depicted in SEQ ID NO: 64, CDR-L3 as depicted in SEQ ID NO: 65, CDR-H1 as depicted in SEQ ID NO: 60, CDR-H2 as depicted in SEQ ID NO: 61, and CDR-H3 as depicted in SEQ ID NO: 62;
(c) CDR-L1 as depicted in SEQ ID NO: 81, CDR-L2 as depicted in SEQ ID NO: 82, CDR-L3 as depicted in SEQ ID NO: 83, CDR-H1 as depicted in SEQ ID NO: 78, CDR-H2 as depicted in SEQ ID NO: 79, and CDR-H3 as depicted in SEQ ID NO: 80;
(d) CDR-L1 as depicted in SEQ ID NO: 99, CDR-L2 as depicted in SEQ ID NO: 100, CDR-L3 as depicted in SEQ ID NO: 101, CDR-H1 as depicted in SEQ ID NO: 96, CDR-H2 as depicted in SEQ ID NO: 97, and CDR-H3 as depicted in SEQ ID NO: 98;
(e) CDR-L1 as depicted in SEQ ID NO: 117, CDR-L2 as depicted in SEQ ID NO: 118, CDR-L3 as depicted in SEQ ID NO: 119, CDR-H1 as depicted in SEQ ID NO: 114, CDR-H2 as depicted in SEQ ID NO: 115, and CDR-H3 as depicted in SEQ ID NO: 116;
(f) CDR-L1 as depicted in SEQ ID NO: 135, CDR-L2 as depicted in SEQ ID NO: 136, CDR-L3 as depicted in SEQ ID NO: 137, CDR-H1 as depicted in SEQ ID NO: 132, CDR-H2 as depicted in SEQ ID NO: 133, and CDR-H3 as depicted in SEQ ID NO: 134;
(g) CDR-L1 as depicted in SEQ ID NO: 153, CDR-L2 as depicted in SEQ ID NO: 154, CDR-L3 as depicted in SEQ ID NO: 155, CDR-H1 as depicted in SEQ ID NO: 150, CDR-H2 as depicted in SEQ ID NO: 151, and CDR-H3 as depicted in SEQ ID NO: 152;
(h) CDR-L1 as depicted in SEQ ID NO: 171, CDR-L2 as depicted in SEQ ID NO: 172 CDR-L3 as depicted in SEQ ID NO: 173, CDR-H1 as depicted in SEQ ID NO: 168, CDR-H2 as depicted in SEQ ID NO: 169, and CDR-H3 as depicted in SEQ ID NO: 170;
(i) CDR-L1 as depicted in SEQ ID NO: 189, CDR-L2 as depicted in SEQ ID NO: 190 CDR-L3 as depicted in SEQ ID NO: 191, CDR-H1 as depicted in SEQ ID NO: 186, CDR-H2 as depicted in SEQ ID NO: 187, and CDR-H3 as depicted in SEQ ID NO: 188;
(j) CDR-L1 as depicted in SEQ ID NO: 207, CDR-L2 as depicted in SEQ ID NO: 208 CDR-L3 as depicted in SEQ ID NO: 209, CDR-H1 as depicted in SEQ ID NO: 204, CDR-H2 as depicted in SEQ ID NO: 205, and CDR-H3 as depicted in SEQ ID NO: 206;
(k) CDR-L1 as depicted in SEQ ID NO: 225, CDR-L2 as depicted in SEQ ID NO: 226 CDR-L3 as depicted in SEQ ID NO: 227, CDR-H1 as depicted in SEQ ID NO: 222, CDR-H2 as depicted in SEQ ID NO: 223, and CDR-H3 as depicted in SEQ ID NO: 224;
(l) CDR-L1 as depicted in SEQ ID NO: 243, CDR-L2 as depicted in SEQ ID NO: 244 CDR-L3 as depicted in SEQ ID NO: 245, CDR-H1 as depicted in SEQ ID NO: 240, CDR-H2 as depicted in SEQ ID NO: 241, and CDR-H3 as depicted in SEQ ID NO: 242;
(m) CDR-L1 as depicted in SEQ ID NO: 261, CDR-L2 as depicted in SEQ ID NO: 262 CDR-L3 as depicted in SEQ ID NO: 263, CDR-H1 as depicted in SEQ ID NO: 258, CDR-H2 as depicted in SEQ ID NO: 259, and CDR-H3 as depicted in SEQ ID NO: 260;
(n) CDR-L1 as depicted in SEQ ID NO: 279, CDR-L2 as depicted in SEQ ID NO: 280 CDR-L3 as depicted in SEQ ID NO: 281, CDR-H1 as depicted in SEQ ID NO: 276, CDR-H2 as depicted in SEQ ID NO: 277, and CDR-H3 as depicted in SEQ ID NO: 278; and
(o) CDR-L1 as depicted in SEQ ID NO: 297, CDR-L2 as depicted in SEQ ID NO: 298, CDR-L3 as depicted in SEQ ID NO: 299, CDR-H1 as depicted in SEQ ID NO: 294, CDR-H2 as depicted in SEQ ID NO: 295, and CDR-H3 as depicted in SEQ ID NO: 296.
(p) CDR-L1 as depicted in SEQ ID NO: 315, CDR-L2 as depicted in SEQ ID NO: 316, CDR-L3 as depicted in SEQ ID NO: 317, CDR-H1 as depicted in SEQ ID NO: 312, CDR-H2 as depicted in SEQ ID NO: 313, and CDR-H3 as depicted in SEQ ID NO: 314.
(q) CDR-L1 as depicted in SEQ ID NO: 330, CDR-L2 as depicted in SEQ ID NO: 331, CDR-L3 as depicted in SEQ ID NO: 332, CDR-H1 as depicted in SEQ ID NO: 327, CDR-H2 as depicted in SEQ ID NO: 328, and CDR-H3 as depicted in SEQ ID NO: 329.
(r) CDR-L1 as depicted in SEQ ID NO: 345, CDR-L2 as depicted in SEQ ID NO: 346, CDR-L3 as depicted in SEQ ID NO: 347, CDR-H1 as depicted in SEQ ID NO: 342, CDR-H2 as depicted in SEQ ID NO: 343, and CDR-H3 as depicted in SEQ ID NO: 344.
(s) CDR-L1 as depicted in SEQ ID NO: 360, CDR-L2 as depicted in SEQ ID NO: 361, CDR-L3 as depicted in SEQ ID NO: 362, CDR-H1 as depicted in SEQ ID NO: 357, CDR-H2 as depicted in SEQ ID NO: 358, and CDR-H3 as depicted in SEQ ID NO: 359.
(t) CDR-L1 as depicted in SEQ ID NO: 375, CDR-L2 as depicted in SEQ ID NO: 376, CDR-L3 as depicted in SEQ ID NO: 377, CDR-H1 as depicted in SEQ ID NO: 372, CDR-H2 as depicted in SEQ ID NO: 373, and CDR-H3 as depicted in SEQ ID NO: 374.
(u) CDR-L1 as depicted in SEQ ID NO: 390, CDR-L2 as depicted in SEQ ID NO: 391, CDR-L3 as depicted in SEQ ID NO: 392, CDR-H1 as depicted in SEQ ID NO: 387, CDR-H2 as depicted in SEQ ID NO: 388, and CDR-H3 as depicted in SEQ ID NO: 389.
(v) CDR-L1 as depicted in SEQ ID NO: 405, CDR-L2 as depicted in SEQ ID NO: 406, CDR-L3 as depicted in SEQ ID NO: 407, CDR-H1 as depicted in SEQ ID NO: 402, CDR-H2 as depicted in SEQ ID NO: 403, and CDR-H3 as depicted in SEQ ID NO: 404.
(w) CDR-L1 as depicted in SEQ ID NO: 420, CDR-L2 as depicted in SEQ ID NO: 421, CDR-L3 as depicted in SEQ ID NO: 422, CDR-H1 as depicted in SEQ ID NO: 417, CDR-H2 as depicted in SEQ ID NO: 418, and CDR-H3 as depicted in SEQ ID NO: 419.
(x) CDR-L1 as depicted in SEQ ID NO: 435, CDR-L2 as depicted in SEQ ID NO: 436, CDR-L3 as depicted in SEQ ID NO: 437, CDR-H1 as depicted in SEQ ID NO: 432, CDR-H2 as depicted in SEQ ID NO: 433, and CDR-H3 as depicted in SEQ ID NO: 434.
(y) CDR-L1 as depicted in SEQ ID NO: 450, CDR-L2 as depicted in SEQ ID NO: 451, CDR-L3 as depicted in SEQ ID NO: 452, CDR-H1 as depicted in SEQ ID NO: 447, CDR-H2 as depicted in SEQ ID NO: 448, and CDR-H3 as depicted in SEQ ID NO: 449.
(z) CDR-L1 as depicted in SEQ ID NO: 465, CDR-L2 as depicted in SEQ ID NO: 466, CDR-L3 as depicted in SEQ ID NO: 467, CDR-H1 as depicted in SEQ ID NO: 462, CDR-H2 as depicted in SEQ ID NO: 463 and CDR-H3 as depicted in SEQ ID NO: 464.

[0113] It is furthermore envisaged that the first binding domain of the antibody construct of the invention comprises a VH region and a VL region selected from the group consisting of:

(a) a VH region as depicted in SEQ ID NO: 48 and a VL region as depicted in SEQ ID NO: 49;
(b) a VH region as depicted in SEQ ID NO: 66 and a VL region as depicted in SEQ ID NO: 67;
(c) a VH region as depicted in SEQ ID NO: 72 and a VL region as depicted in SEQ ID NO: 73;
(d) a VH region as depicted in SEQ ID NO: 84 and a VL region as depicted in SEQ ID NO: 85;
(e) a VH region as depicted in SEQ ID NO: 90 and a VL region as depicted in SEQ ID NO: 91;
(f) a VH region as depicted in SEQ ID NO: 102 and a VL region as depicted in SEQ ID NO: 103;
(g) a VH region as depicted in SEQ ID NO: 108 and a VL region as depicted in SEQ ID NO: 109;
(h) a VH region as depicted in SEQ ID NO: 120 and a VL region as depicted in SEQ ID NO: 121;
(i) a VH region as depicted in SEQ ID NO: 126 and a VL region as depicted in SEQ ID NO: 127;
(j) a VH region as depicted in SEQ ID NO: 138 and a VL region as depicted in SEQ ID NO: 139;
(k) a VH region as depicted in SEQ ID NO: 144 and a VL region as depicted in SEQ ID NO: 145;
(l) a VH region as depicted in SEQ ID NO: 156 and a VL region as depicted in SEQ ID NO: 157;
(m) a VH region as depicted in SEQ ID NO: 162 and a VL region as depicted in SEQ ID NO: 163;
(n) a VH region as depicted in SEQ ID NO: 180 and a VL region as depicted in SEQ ID NO: 181;
(o) a VH region as depicted in SEQ ID NO: 192 and a VL region as depicted in SEQ ID NO: 193;
(p) a VH region as depicted in SEQ ID NO: 198 and a VL region as depicted in SEQ ID NO: 199;
(q) a VH region as depicted in SEQ ID NO: 210 and a VL region as depicted in SEQ ID NO: 211;
(r) a VH region as depicted in SEQ ID NO: 216 and a VL region as depicted in SEQ ID NO: 217;
(s) a VH region as depicted in SEQ ID NO: 228 and a VL region as depicted in SEQ ID NO: 229;
(t) a VH region as depicted in SEQ ID NO: 234 and a VL region as depicted in SEQ ID NO: 235;
(u) a VH region as depicted in SEQ ID NO: 246 and a VL region as depicted in SEQ ID NO: 247;
(v) a VH region as depicted in SEQ ID NO: 252 and a VL region as depicted in SEQ ID NO: 253;
(w) a VH region as depicted in SEQ ID NO: 264 and a VL region as depicted in SEQ ID NO: 265;
(x) a VH region as depicted in SEQ ID NO: 270 and a VL region as depicted in SEQ ID NO: 271;
(y) a VH region as depicted in SEQ ID NO: 282 and a VL region as depicted in SEQ ID NO: 283;
(z) a VH region as depicted in SEQ ID NO: 288 and a VL region as depicted in SEQ ID NO: 289;
(aa) a VH region as depicted in SEQ ID NO: 300 and a VL region as depicted in SEQ ID NO: 301;
(ab) a VH region as depicted in SEQ ID NO: 306 and a VL region as depicted in SEQ ID NO: 307
(ac) a VH region as depicted in SEQ ID NO: 54 and a VL region as depicted in SEQ ID NO: 55
(ad) a VH region as depicted in SEQ ID NO: 174 and a VL region as depicted in SEQ ID NO: 175.
(ae) a VH region as depicted in SEQ ID NO: 318 and a VL region as depicted in SEQ ID NO: 319;
(af) a VH region as depicted in SEQ ID NO: 333 and a VL region as depicted in SEQ ID NO: 334;
(ag) a VH region as depicted in SEQ ID NO: 348 and a VL region as depicted in SEQ ID NO: 349;
(ah) a VH region as depicted in SEQ ID NO: 363 and a VL region as depicted in SEQ ID NO: 364;
(ai) a VH region as depicted in SEQ ID NO: 378 and a VL region as depicted in SEQ ID NO: 379;
(aj) a VH region as depicted in SEQ ID NO: 393 and a VL region as depicted in SEQ ID NO: 394;
(ak) a VH region as depicted in SEQ ID NO: 408 and a VL region as depicted in SEQ ID NO: 409;
(al) a VH region as depicted in SEQ ID NO: 423 and a VL region as depicted in SEQ ID NO: 424;
(am) a VH region as depicted in SEQ ID NO: 438 and a VL region as depicted in SEQ ID NO: 439;
(an) a VH region as depicted in SEQ ID NO: 453 and a VL region as depicted in SEQ ID NO: 454; and
(ao) a VH region as depicted in SEQ ID NO: 468 and a VL region as depicted in SEQ ID NO: 469.

[0114] It is furthermore envisaged that the first binding domain of the antibody construct of the invention comprises an amino acid sequence selected from the group consisting of those depicted in SEQ ID NOs: 50, 56, 68, 74, 86, 92, 104, 110, 122, 128, 140, 146, 158, 164, 176, 182, 194, 200, 212, 218, 230, 236, 248, 254, 266, 272, 284, 290, 302, 308, 320, 335, 350, 365, 380, 395, 410, 425, 440, 455, and 470.

[0115] The invention further provides an antibody construct comprising or having an amino acid sequence selected from the group consisting of SEQ ID NO: 51, 57, 69, 75, 87, 93, 105, 111, 123, 129, 141, 147, 159, 165, 177, 183, 195, 201, 213, 219, 231, 237, 249, 255, 267, 273, 285, 291, 303, 309, 321, 324, 336, 339, 351, 354, 366, 369, 381, 384, 396, 399, 411, 414, 426, 429, 441, 444, 456, 459, 471 and 474.

[0116] Covalent modifications of the antibody constructs are also included within the scope of this invention, and are generally, but not always, done post-translationally. For example, several types of covalent modifications of the antibody construct are introduced into the molecule by reacting specific amino acid residues of the antibody construct with an organic derivatizing agent that is capable of reacting with selected side chains or the N- or C-terminal residues.

[0117] Cysteinyl residues most commonly are reacted with α-haloacetates (and corresponding amines), such as chloroacetic acid or chloroacetamide, to give carboxymethyl or carboxyamidomethyl derivatives. Cysteinyl residues also are derivatized by reaction with bromotrifluoroacetone, α-bromo-β-(5-imidozoyl)propionic acid, chloroacetyl phosphate, N-alkylmaleimides, 3-nitro-2-pyridyl disulfide, methyl 2-pyridyl disulfide, p-chloromercuribenzoate, 2-chloromercuri-4-nitrophenol, or chloro-7-nitrobenzo-2-oxa-1,3-diazole.

[0118] Histidyl residues are derivatized by reaction with diethylpyrocarbonate at pH 5.5-7.0 because this agent is relatively specific for the histidyl side chain. Para-bromophenacyl bromide also is useful; the reaction is preferably performed in 0.1 M sodium cacodylate at pH 6.0. Lysinyl and amino terminal residues are reacted with succinic or other carboxylic acid anhydrides. Derivatization with these agents has the effect of reversing the charge of the lysinyl residues. Other suitable reagents for derivatizing alpha-amino-containing residues include imidoesters such as methyl picolinimidate; pyridoxal phosphate; pyridoxal; chloroborohydride; trinitrobenzenesulfonic acid; O-methylisourea; 2,4-pentanedione; and transaminase-catalyzed reaction with glyoxylate.

[0119] Arginyl residues are modified by reaction with one or several conventional reagents, among them phenylglyoxal, 2,3-butanedione, 1,2-cyclohexanedione, and ninhydrin. Derivatization of arginine residues requires that the reaction be performed in alkaline conditions because of the high pKa of the guanidine functional group. Furthermore, these reagents may react with the groups of lysine as well as the arginine epsilon-amino group.

[0120] The specific modification of tyrosyl residues may be made, with particular interest in introducing spectral labels into tyrosyl residues by reaction with aromatic diazonium compounds or tetranitromethane. Most commonly, N-acetylimidizole and tetranitromethane are used to form O-acetyl tyrosyl species and 3-nitro derivatives, respectively. Tyrosyl residues are iodinated using ¹²⁵I or ¹³¹I to prepare labeled proteins for use in radioimmunoassay, the chloramine T method described above being suitable.

[0121] Carboxyl side groups (aspartyl or glutamyl) are selectively modified by reaction with carbodiimides (R′—N═C═N—R′), where R and R′ are optionally different alkyl groups, such as 1-cyclohexyl-3-(2-morpholinyl-4-ethyl) carbodiimide or 1-ethyl-3-(4-azonia-4,4-dimethylpentyl) carbodiimide. Furthermore, aspartyl and glutamyl residues are converted to asparaginyl and glutaminyl residues by reaction with ammonium ions.

[0122] Derivatization with bifunctional agents is useful for crosslinking the antibody constructs of the present invention to a water-insoluble support matrix or surface for use in a variety of methods. Commonly used crosslinking agents include, e.g., 1,1-bis(diazoacetyl)-2-phenylethane, glutaraldehyde, N-hydroxysuccinimide esters, for example, esters with 4-azidosalicylic acid, homobifunctional imidoesters, including disuccinimidyl esters such as 3,3′-dithiobis(succinimidylpropionate), and bifunctional maleimides such as bis-N-maleimido-1,8-octane. Derivatizing agents such as methyl-3-[(p-azidophenyl)dithio]propioimidate yield photoactivatable intermediates that are capable of forming crosslinks in the presence of light. Alternatively, reactive water-insoluble matrices such as cyanogen bromide-activated carbohydrates and the reactive substrates as described in U.S. Pat. Nos. 3,969,287; 3,691,016; 4,195,128; 4,247,642; 4,229,537; and 4,330,440 are employed for protein immobilization.

[0123] Glutaminyl and asparaginyl residues are frequently deamidated to the corresponding glutamyl and aspartyl residues, respectively. Alternatively, these residues are deamidated under mildly acidic conditions. Either form of these residues falls within the scope of this invention.

[0124] Other modifications include hydroxylation of proline and lysine, phosphorylation of hydroxyl groups of seryl or threonyl residues, methylation of the α-amino groups of lysine, arginine, and histidine side chains (T. E. Creighton, Proteins: Structure and Molecular Properties, W. H. Freeman & Co., San Francisco, 1983, pp. 79-86), acetylation of the N-terminal amine, and amidation of any C-terminal carboxyl group.

[0125] Another type of covalent modification of the antibody constructs included within the scope of this invention comprises altering the glycosylation pattern of the protein. As is known in the art, glycosylation patterns can depend on both the sequence of the protein (e.g., the presence or absence of particular glycosylation amino acid residues, discussed below), or the host cell or organism in which the protein is produced. Particular expression systems are discussed below.

[0126] Glycosylation of polypeptides is typically either N-linked or O-linked. N-linked refers to the attachment of the carbohydrate moiety to the side chain of an asparagine residue. The tri-peptide sequences asparagine-X-serine and asparagine-X-threonine, where X is any amino acid except proline, are the recognition sequences for enzymatic attachment of the carbohydrate moiety to the asparagine side chain. Thus, the presence of either of these tri-peptide sequences in a polypeptide creates a potential glycosylation site. O-linked glycosylation refers to the attachment of one of the sugars N-acetylgalactosamine, galactose, or xylose, to a hydroxyamino acid, most commonly serine or threonine, although 5-hydroxyproline or 5-hydroxylysine may also be used.

[0127] Addition of glycosylation sites to the antibody construct is conveniently accomplished by altering the amino acid sequence such that it contains one or more of the above-described tri-peptide sequences (for N-linked glycosylation sites). The alteration may also be made by the addition of, or substitution by, one or more serine or threonine residues to the starting sequence (for O-linked glycosylation sites). For ease, the amino acid sequence of an antibody construct is preferably altered through changes at the DNA level, particularly by mutating the DNA encoding the polypeptide at preselected bases such that codons are generated that will translate into the desired amino acids.

[0128] Another means of increasing the number of carbohydrate moieties on the antibody construct is by chemical or enzymatic coupling of glycosides to the protein. These procedures are advantageous in that they do not require production of the protein in a host cell that has glycosylation capabilities for N- and O-linked glycosylation. Depending on the coupling mode used, the sugar(s) may be attached to (a) arginine and histidine, (b) free carboxyl groups, (c) free sulfhydryl groups such as those of cysteine, (d) free hydroxyl groups such as those of serine, threonine, or hydroxyproline, (e) aromatic residues such as those of phenylalanine, tyrosine, or tryptophan, or (f) the amide group of glutamine. These methods are described in WO 87/05330, and in Aplin and Wriston, 1981, CRC Crit. Rev. Biochem., pp. 259-306.

[0129] Removal of carbohydrate moieties present on the starting antibody construct may be accomplished chemically or enzymatically. Chemical deglycosylation requires exposure of the protein to the compound trifluoromethanesulfonic acid, or an equivalent compound. This treatment results in the cleavage of most or all sugars except the linking sugar (N-acetylglucosamine or N-acetylgalactosamine), while leaving the polypeptide intact. Chemical deglycosylation is described by Hakimuddin et al., 1987, Arch. Biochem. Biophys. 259:52 and by Edge et al., 1981, Anal. Biochem. 118:131. Enzymatic cleavage of carbohydrate moieties on polypeptides can be achieved by the use of a variety of endo- and exo-glycosidases as described by Thotakura et al., 1987, Meth. Enzymol. 138:350. Glycosylation at potential glycosylation sites may be prevented by the use of the compound tunicamycin as described by Duskin et al., 1982, J. Biol. Chem. 257:3105. Tunicamycin blocks the formation of protein-N-glycoside linkages.

[0130] Other modifications of the antibody construct are also contemplated herein. For example, another type of covalent modification of the antibody construct comprises linking the antibody construct to various non-proteinaceous polymers, including, but not limited to, various polyols such as polyethylene glycol, polypropylene glycol, polyoxyalkylenes, or copolymers of polyethylene glycol and polypropylene glycol, in the manner set forth in U.S. Pat. No. 4,640,835; 4,496,689; 4,301,144; 4,670,417; 4,791,192 or 4,179,337. In addition, as is known in the art, amino acid substitutions may be made in various positions within the antibody construct, e.g. in order to facilitate the addition of polymers such as PEG.

[0131] In some embodiments, the covalent modification of the antibody constructs of the invention comprises the addition of one or more labels. The labelling group may be coupled to the antibody construct via spacer arms of various lengths to reduce potential steric hindrance. Various methods for labelling proteins are known in the art and can be used in performing the present invention. The term “label” or “labelling group” refers to any detectable label. In general, labels fall into a variety of classes, depending on the assay in which they are to be detected—the following examples include, but are not limited to:
[0132] a) isotopic labels, which may be radioactive or heavy isotopes, such as radioisotopes or radionuclides (e.g., ³H, ¹⁴C, ¹⁵N, ³⁵S, ⁸⁹Zr, ⁹⁰Y, ⁹⁹Tc, ¹¹¹In, ¹²⁵I, ¹³¹I)
[0133] b) magnetic labels (e.g., magnetic particles)
[0134] c) redox active moieties
[0135] d) optical dyes (including, but not limited to, chromophores, phosphors and fluorophores) such as fluorescent groups (e.g., FITC, rhodamine, lanthanide phosphors), chemiluminescent groups, and fluorophores which can be either “small molecule” fluores or proteinaceous fluores
[0136] e) enzymatic groups (e.g. horseradish peroxidase, β-galactosidase, luciferase, alkaline phosphatase)
[0137] f) biotinylated groups
[0138] g) predetermined polypeptide epitopes recognized by a secondary reporter (e.g., leucine zipper pair sequences, binding sides for secondary antibodies, metal binding domains, epitope tags, etc.)

[0139] By “fluorescent label” is meant any molecule that may be detected via its inherent fluorescent properties. Suitable fluorescent labels include, but are not limited to, fluorescein, rhodamine, tetramethylrhodamine, eosin, erythrosin, coumarin, methyl-coumarins, pyrene, Malacite green, stilbene, Lucifer Yellow, Cascade BlueJ, Texas Red, IAEDANS, EDANS, BODIPY FL, LC Red 640, Cy 5, Cy 5.5, LC Red 705, Oregon green, the Alexa-Fluor dyes (Alexa Fluor 350, Alexa Fluor 430, Alexa Fluor 488, Alexa Fluor 546, Alexa Fluor 568, Alexa Fluor 594, Alexa Fluor 633, Alexa Fluor 660, Alexa Fluor 680), Cascade Blue, Cascade Yellow and R-phycoerythrin (PE) (Molecular Probes, Eugene, Oreg.), FITC, Rhodamine, and Texas Red (Pierce, Rockford, Ill.), Cy5, Cy5.5, Cy7 (Amersham Life Science, Pittsburgh, Pa.). Suitable optical dyes, including fluorophores, are described in Molecular Probes Handbook by Richard P. Haugland.

[0140] Suitable proteinaceous fluorescent labels also include, but are not limited to, green fluorescent protein, including a Renilla, Ptilosarcus, or Aequorea species of GFP (Chalfie et al., 1994, Science 263:802-805), EGFP (Clontech Laboratories, Inc., Genbank Accession Number U55762), blue fluorescent protein (BFP, Quantum Biotechnologies, Inc. 1801 de Maisonneuve Blvd. West, 8th Floor, Montreal, Quebec, Canada H3H 1J9; Stauber, 1998, Biotechniques 24:462-471; Heim et al., 1996, Curr. Biol. 6:178-182), enhanced yellow fluorescent protein (EYFP, Clontech Laboratories, Inc.), luciferase (Ichiki et al., 1993, J. Immunol. 150:5408-5417), β galactosidase (Nolan et al., 1988, Proc. Natl. Acad. Sci. U.S.A. 85:2603-2607) and Renilla (WO92/15673, WO95/07463, WO98/14605, WO98/26277, WO99/49019, U.S. Pat. Nos. 5,292,658; 5,418,155; 5,683,888; 5,741,668; 5,777,079; 5,804,387; 5,874,304; 5,876,995; 5,925,558).

[0141] The antibody construct of the invention may also comprise additional domains, which are e.g. helpful in the isolation of the molecule or relate to an adapted pharmacokinetic profile of the molecule. Domains helpful for the isolation of an antibody construct may be selected from peptide motives or secondarily introduced moieties, which can be captured in an isolation method, e.g. an isolation column. Non-limiting embodiments of such additional domains comprise peptide motives known as Myc-tag, HAT-tag, HA-tag, TAP-tag, GST-tag, chitin binding domain (CBD-tag), maltose binding protein (MBP-tag), Flag-tag, Strep-tag and variants thereof (e.g. Strepll-tag) and His-tag. All herein disclosed antibody constructs may comprise a His-tag domain, which is generally known as a repeat of consecutive His residues in the amino acid sequence of a molecule, preferably of five, and more preferably of six His residues (hexa-histidine). The His-tag may be located e.g. at the N- or C-terminus of the antibody construct, preferably it is located at the C-terminus. Most preferably, a hexa-histidine tag (HHHHHH) (SEQ ID NO:16) is linked via peptide bond to the C-terminus of the antibody construct according to the invention. Additionally, a conjugate system of PLGA-PEG-PLGA may be combined with a poly-histidine tag for sustained release application and improved pharmacokinetic profile.

[0142] Amino acid sequence modifications of the antibody constructs described herein are also contemplated. For example, it may be desirable to improve the binding affinity and/or other biological properties of the antibody construct. Amino acid sequence variants of the antibody constructs are prepared by introducing appropriate nucleotide changes into the antibody constructs nucleic acid, or by peptide synthesis. All of the below described amino acid sequence modifications should result in an antibody construct which still retains the desired biological activity (binding to PSMA and to CD3) of the unmodified parental molecule.

[0143] The term “amino acid” or “amino acid residue” typically refers to an amino acid having its art recognized definition such as an amino acid selected from the group consisting of: alanine (Ala or A); arginine (Arg or R); asparagine (Asn or N); aspartic acid (Asp or D); cysteine (Cys or C); glutamine (Gln or Q); glutamic acid (Glu or E); glycine (Gly or G); histidine (His or H); isoleucine (He or I): leucine (Leu or L); lysine (Lys or K); methionine (Met or M); phenylalanine (Phe or F); pro line (Pro or P); serine (Ser or S); threonine (Thr or T); tryptophan (Trp or W); tyrosine (Tyr or Y); and valine (Val or V), although modified, synthetic, or rare amino acids may be used as desired. Generally, amino acids can be grouped as having a nonpolar side chain (e.g., Ala, Cys, He, Leu, Met, Phe, Pro, Val); a negatively charged side chain (e.g., Asp, Glu); a positively charged sidechain (e.g., Arg, His, Lys); or an uncharged polar side chain (e.g., Asn, Cys, Gin, Gly, His, Met, Phe, Ser, Thr, Trp, and Tyr).

[0144] Amino acid modifications include, for example, deletions from, and/or insertions into, and/or substitutions of, residues within the amino acid sequences of the antibody constructs. Any combination of deletion, insertion, and substitution is made to arrive at the final construct, provided that the final construct possesses the desired characteristics. The amino acid changes also may alter post-translational processes of the antibody constructs, such as changing the number or position of glycosylation sites.

[0145] For example, 1, 2, 3, 4, 5, or 6 amino acids may be inserted, substituted or deleted in each of the CDRs (of course, dependent on their length), while 1, 2, 3, 4, 5, 6, 7, 8, 9, 10, 11, 12, 13, 14, 15, 16, 17, 18, 19, 20, or 25 amino acids may be inserted, substituted or deleted in each of the FRs. Preferably, amino acid sequence insertions into the antibody construct include amino- and/or carboxyl-terminal fusions ranging in length from 1, 2, 3, 4, 5, 6, 7, 8, 9 or 10 residues to polypeptides containing a hundred or more residues, as well as intra-sequence insertions of single or multiple amino acid residues. Corresponding modifications may also performed within the third domain of the antibody construct of the invention. An insertional variant of the antibody construct of the invention includes the fusion to the N-terminus or to the C-terminus of the antibody construct of an enzyme or the fusion to a polypeptide.

[0146] The sites of greatest interest for substitutional mutagenesis include (but are not limited to) the CDRs of the heavy and/or light chain, in particular the hypervariable regions, but FR alterations in the heavy and/or light chain are also contemplated. The substitutions are preferably conservative substitutions as described herein. Preferably, 1, 2, 3, 4, 5, 6, 7, 8, 9, or 10 amino acids may be substituted in a CDR, while 1, 2, 3, 4, 5, 6, 7, 8, 9, 10, 11, 12, 13, 14, 15, 16, 17, 18, 19, 20, or 25 amino acids may be substituted in the framework regions (FRs), depending on the length of the CDR or FR. For example, if a CDR sequence encompasses 6 amino acids, it is envisaged that one, two or three of these amino acids are substituted. Similarly, if a CDR sequence encompasses 15 amino acids it is envisaged that one, two, three, four, five or six of these amino acids are substituted.

[0147] A useful method for identification of certain residues or regions of the antibody constructs that are preferred locations for mutagenesis is called “alanine scanning mutagenesis” as described by Cunningham and Wells in Science, 244: 1081-1085 (1989). Here, a residue or group of target residues within the antibody construct is/are identified (e.g. charged residues such as arg, asp, his, lys, and glu) and replaced by a neutral or negatively charged amino acid (most preferably alanine or polyalanine) to affect the interaction of the amino acids with the epitope.

[0148] Those amino acid locations demonstrating functional sensitivity to the substitutions are then refined by introducing further or other variants at, or for, the sites of substitution. Thus, while the site or region for introducing an amino acid sequence variation is predetermined, the nature of the mutation per se needs not to be predetermined. For example, to analyze or optimize the performance of a mutation at a given site, alanine scanning or random mutagenesis may be conducted at a target codon or region, and the expressed antibody construct variants are screened for the optimal combination of desired activity. Techniques for making substitution mutations at predetermined sites in the DNA having a known sequence are well known, for example, M13 primer mutagenesis and PCR mutagenesis. Screening of the mutants is done using assays of antigen binding activities, such as PSMA or CD3 binding.

[0149] Generally, if amino acids are substituted in one or more or all of the CDRs of the heavy and/or light chain, it is preferred that the then-obtained “substituted” sequence is at least 60% or 65%, more preferably 70% or 75%, even more preferably 80% or 85%, and particularly preferably 90% or 95% identical to the “original” CDR sequence. This means that it is dependent of the length of the CDR to which degree it is identical to the “substituted” sequence. For example, a CDR having 5 amino acids is preferably 80% identical to its substituted sequence in order to have at least one amino acid substituted. Accordingly, the CDRs of the antibody construct may have different degrees of identity to their substituted sequences, e.g., CDRL1 may have 80%, while CDRL3 may have 90%.

[0150] Preferred substitutions (or replacements) are conservative substitutions. However, any substitution (including non-conservative substitution or one or more from the “exemplary substitutions” listed in Table 3, below) is envisaged as long as the antibody construct retains its capability to bind to PSMA via the first domain and to CD3 epsilon via the second domain and/or its CDRs have an identity to the then substituted sequence (at least 60% or 65%, more preferably 70% or 75%, even more preferably 80% or 85%, and particularly preferably 90% or 95% identical to the “original” CDR sequence).

[0151] Conservative substitutions are shown in Table 3 under the heading of “preferred substitutions”. If such substitutions result in a change in biological activity, then more substantial changes, denominated “exemplary substitutions” in Table 3, or as further described below in reference to amino acid classes, may be introduced and the products screened for a desired characteristic.

TABLE 3
Amino acid substitutions

| | | Preferred |
|---|---|---|
| Original | Exemplary Substitutions | Substitutions |
| Ala (A) | val, leu, ile | val |
| Arg (R) | lys, gln, asn | lys |
| Asn (N) | gln, his, asp, lys, arg | gln |
| Asp (D) | glu, asn | glu |
| Cys (C) | ser, ala | ser |
| Gln (Q) | asn, glu | asn |
| Glu (E) | asp, gln | asp |
| Gly (G) | Ala | ala |
| His (H) | asn, gln, lys, arg | arg |
| Ile (I) | leu, val, met, ala, phe | leu |
| Leu (L) | norleucine, ile, val, met, ala | ile |
| Lys (K) | arg, gln, asn | arg |
| Met (M) | leu, phe, ile | leu |
| Phe (F) | leu, val, ile, ala, tyr | tyr |
| Pro (P) | Ala | ala |
| Ser (S) | Thr | thr |
| Thr (T) | Ser | ser |
| Trp (W) | tyr, phe | tyr |
| Tyr (Y) | trp, phe, thr, ser | phe |
| Val (V) | ile, leu, met, phe, ala | leu |

[0152] Substantial modifications in the biological properties of the antibody construct of the present invention are accomplished by selecting substitutions that differ significantly in their effect on maintaining (a) the structure of the polypeptide backbone in the area of the substitution, for example, as a sheet or helical conformation, (b) the charge or hydrophobicity of the molecule at the target site, or (c) the bulk of the side chain. Naturally occurring residues are divided into groups based on common side-chain properties: (1) hydrophobic: norleucine, met, ala, val, leu, ile; (2) neutral hydrophilic: cys, ser, thr; asn, gin (3) acidic: asp, glu; (4) basic: his, lys, arg; (5) residues that influence chain orientation: gly, pro; and (6) aromatic: trp, tyr, phe.

[0153] Non-conservative substitutions will entail exchanging a member of one of these classes for another class. Any cysteine residue not involved in maintaining the proper conformation of the antibody construct may be substituted, generally with serine, to improve the oxidative stability of the molecule and prevent aberrant crosslinking. Conversely, cysteine bond(s) may be added to the antibody to improve its stability (particularly where the antibody is an antibody fragment such as an Fv fragment).

[0154] For amino acid sequences, sequence identity and/or similarity is determined by using standard techniques known in the art, including, but not limited to, the local sequence identity algorithm of Smith and Waterman, 1981, Adv. Appl. Math. 2:482, the sequence identity alignment algorithm of Needleman and Wunsch, 1970, J. Mol. Biol. 48:443, the search for similarity method of Pearson and Lipman, 1988, Proc. Nat. Acad. Sci. U.S.A. 85:2444, computerized implementations of these algorithms (GAP, BESTFIT, FASTA, and TFASTA in the Wisconsin Genetics Software Package, Genetics Computer Group, 575 Science Drive, Madison, Wis.), the Best Fit sequence program described by Devereux et al., 1984, Nucl. Acid Res. 12:387-395, preferably using the default settings, or by inspection. Preferably, percent identity is calculated by FastDB based upon the following parameters: mismatch penalty of 1; gap penalty of 1; gap size penalty of 0.33; and joining penalty of 30, “Current Methods in Sequence Comparison and Analysis,” Macromolecule Sequencing and Synthesis, Selected Methods and Applications, pp 127-149 (1988), Alan R. Liss, Inc.

[0155] An example of a useful algorithm is PILEUP. PILEUP creates a multiple sequence alignment from a group of related sequences using progressive, pairwise alignments. It can also plot a tree showing the clustering relationships used to create the alignment. PILEUP uses a simplification of the progressive alignment method of Feng & Doolittle, 1987, J. Mol. Evol. 35:351-360; the method is similar to that described by Higgins and Sharp, 1989, CABIOS 5:151-153. Useful PILEUP parameters including a default gap weight of 3.00, a default gap length weight of 0.10, and weighted end gaps.

[0156] Another example of a useful algorithm is the BLAST algorithm, described in: Altschul et al., 1990, J. Mol. Biol. 215:403-410; Altschul et al., 1997, Nucleic Acids Res. 25:3389-3402; and Karin et al., 1993, Proc. Natl. Acad. Sci. U.S.A. 90:5873-5787. A particularly useful BLAST program is the WU-BLAST-2 program which was obtained from Altschul et al., 1996, Methods in Enzymology 266:460-480. WU-BLAST-2 uses several search parameters, most of which are set to the default values. The adjustable parameters are set with the following values: overlap span=1, overlap fraction=0.125, word threshold (T)=II. The HSP S and HSP S2 parameters are dynamic values and are established by the program itself depending upon the composition of the particular sequence and composition of the particular database against which the sequence of interest is being searched; however, the values may be adjusted to increase sensitivity.

[0157] An additional useful algorithm is gapped BLAST as reported by Altschul et al., 1993, Nucl. Acids Res. 25:3389-3402. Gapped BLAST uses BLOSUM-62 substitution scores; threshold T parameter set to 9; the two-hit method to trigger ungapped extensions, charges gap lengths of k a cost of 10+k; Xu set to 16, and Xg set to 40 for database search stage and to 67 for the output stage of the algorithms. Gapped alignments are triggered by a score corresponding to about 22 bits.

[0158] Generally, the amino acid homology, similarity, or identity between individual variant CDRs or VH/VL sequences are at least 60% to the sequences depicted herein, and more typically with preferably increasing homologies or identities of at least 65% or 70%, more preferably at least 75% or 80%, even more preferably at least 85%, 90%, 91%, 92%, 93%, 94%, 95%, 96%, 97%, 98%, 99%, and almost 100%. In a similar manner, “percent (%) nucleic acid sequence identity” with respect to the nucleic acid sequence of the binding proteins identified herein is defined as the percentage of nucleotide residues in a candidate sequence that are identical with the nucleotide residues in the coding sequence of the antibody construct. A specific method utilizes the BLASTN module of WU-BLAST-2 set to the default parameters, with overlap span and overlap fraction set to 1 and 0.125, respectively.

[0159] Generally, the nucleic acid sequence homology, similarity, or identity between the nucleotide sequences encoding individual variant CDRs or VH/VL sequences and the nucleotide sequences depicted herein are at least 60%, and more typically with preferably increasing homologies or identities of at least 65%, 70%, 75%, 80%, 81%, 82%, 83%, 84%, 85%, 86%, 87%, 88%, 89%, 90%, 91%, 92%, 93%, 94%, 95%, 96%, 97%, 98%, or 99%, and almost 100%. Thus, a “variant CDR” or a “variant VH/VL region” is one with the specified homology, similarity, or identity to the parent CDR/VH/VL of the invention, and shares biological function, including, but not limited to, at least 60%, 65%, 70%, 75%, 80%, 81%, 82%, 83%, 84%, 85%, 86%, 87%, 88%, 89%, 90%, 91%, 92%, 93%, 94%, 95%, 96%, 97%, 98%, or 99% of the specificity and/or activity of the parent CDR or VH/VL.

[0160] In one embodiment, the percentage of identity to human germline of the antibody constructs according to the invention is ≧70% or ≧75%, more preferably ≧80% or ≧85%, even more preferably ≧90%, and most preferably ≧91%, ≧92%, ≧93%, ≧94%, ≧95% or even ≧96%. Identity to human antibody germline gene products is thought to be an important feature to reduce the risk of therapeutic proteins to elicit an immune response against the drug in the patient during treatment. Hwang & Foote (“Immunogenicity of engineered antibodies”; Methods 36 (2005) 3-10) demonstrate that the reduction of non-human portions of drug antibody constructs leads to a decrease of risk to induce anti-drug antibodies in the patients during treatment. By comparing an exhaustive number of clinically evaluated antibody drugs and the respective immunogenicity data, the trend is shown that humanization of the V-regions of antibodies makes the protein less immunogenic (average 5.1% of patients) than antibodies carrying unaltered non-human V regions (average 23.59% of patients). A higher degree of identity to human sequences is hence desirable for V-region based protein therapeutics in the form of antibody constructs. For this purpose of determining the germline identity, the V-regions of VL can be aligned with the amino acid sequences of human germline V segments and J segments (http://vbase.mrc-cpe.cam.ac.uk/) using Vector NTI software and the amino acid sequence calculated by dividing the identical amino acid residues by the total number of amino acid residues of the VL in percent. The same can be for the VH segments (http://vbase.mrc-cpe.cam.ac.uk/) with the exception that the VH CDR3 may be excluded due to its high diversity and a lack of existing human germline VH CDR3 alignment partners. Recombinant techniques can then be used to increase sequence identity to human antibody germline genes.

[0161] In a further embodiment, the bispecific antibody constructs of the present invention exhibit high monomer yields under standard research scale conditions, e.g., in a standard two-step purification process. Preferably the monomer yield of the antibody constructs according to the invention is ≧0.25 mg/L supernatant, more preferably ≧0.5 mg/L, even more preferably ≧1 mg/L, and most preferably ≧3 mg/L supernatant.

[0162] Likewise, the yield of the dimeric antibody construct isoforms and hence the monomer percentage (i.e., monomer: (monomer+dimer)) of the antibody constructs can be determined. The productivity of monomeric and dimeric antibody constructs and the calculated monomer percentage can e.g. be obtained in the SEC purification step of culture supernatant from standardized research-scale production in roller bottles. In one embodiment, the monomer percentage of the antibody constructs is ≧80%, more preferably ≧85%, even more preferably ≧90%, and most preferably ≧95%.

[0163] In one embodiment, the antibody constructs have a preferred plasma stability (ratio of EC50 with plasma to EC50 w/o plasma) of ≦5 or ≦4, more preferably ≦3.5 or ≦3, even more preferably ≦2.5 or ≦2, and most preferably ≦1.5 or ≦1. The plasma stability of an antibody construct can be tested by incubation of the construct in human plasma at 37° C. for 24 hours followed by EC50 determination in a ⁵¹chromium release cytotoxicity assay. The effector cells in the cytotoxicity assay can be stimulated enriched human CD8 positive T cells. Target cells can e.g. be CHO cells transfected with human PSMA. The effector to target cell (E:T) ratio can be chosen as 10:1. The human plasma pool used for this purpose is derived from the blood of healthy donors collected by EDTA coated syringes. Cellular components are removed by centrifugation and the upper plasma phase is collected and subsequently pooled. As control, antibody constructs are diluted immediately prior to the cytotoxicity assay in RPMI-1640 medium. The plasma stability is calculated as ratio of EC50 (after plasma incubation) to EC50 (control).

[0164] It is furthermore preferred that the monomer to dimer conversion of antibody constructs of the invention is low. The conversion can be measured under different conditions and analyzed by high performance size exclusion chromatography. For example, incubation of the monomeric isoforms of the antibody constructs can be carried out for 7 days at 37° C. and concentrations of e.g. 100 μg/ml or 250 μg/ml in an incubator. Under these conditions, it is preferred that the antibody constructs of the invention show a dimer percentage that is 55%, more preferably 54%, even more preferably ≦3%, even more preferably ≦2.5%, even more preferably ≦2%, even more preferably ≦1.5%, and most preferably ≦1% or 50.5% or even 0%.

[0165] It is also preferred that the bispecific antibody constructs of the present invention present with very low dimer conversion after a number of freeze/thaw cycles. For example, the antibody construct monomer is adjusted to a concentration of 250 μg/ml e.g. in generic formulation buffer and subjected to three freeze/thaw cycles (freezing at −80° C. for 30 min followed by thawing for 30 min at room temperature), followed by high performance SEC to determine the percentage of initially monomeric antibody construct, which had been converted into dimeric antibody construct. Preferably the dimer percentages of the bispecific antibody constructs are 55%, more preferably 54%, even more preferably ≦3%, even more preferably ≦2.5%, even more preferably ≦2%, even more preferably ≦1.5%, and most preferably ≦1% or even 50.5%, for example after three freeze/thaw cycles.

[0166] The bispecific antibody constructs of the present invention preferably show a favorable thermostability with aggregation temperatures ≧45° C. or ≧50° C., more preferably ≧52° C. or ≧54° C., even more preferably ≧56° C. or ≧57° C., and most preferably ≧58° C. or ≧59° C. The thermostability parameter can be determined in terms of antibody aggregation temperature as follows: Antibody solution at a concentration 250 μg/ml is transferred into a single use cuvette and placed in a Dynamic Light Scattering (DLS) device. The sample is heated from 40° C. to 70° C. at a heating rate of 0.5° C./min with constant acquisition of the measured radius. Increase of radius indicating melting of the protein and aggregation is used to calculate the aggregation temperature of the antibody.

[0167] Alternatively, temperature melting curves can be determined by Differential Scanning Calorimetry (DSC) to determine intrinsic biophysical protein stabilities of the antibody constructs. These experiments are performed using a MicroCal LLC (Northampton, Mass., U.S.A) VP-DSC device. The energy uptake of a sample containing an antibody construct is recorded from 20° C. to 90° C. compared to a sample containing only the formulation buffer. The antibody constructs are adjusted to a final concentration of 250 μg/ml e.g. in SEC running buffer. For recording of the respective melting curve, the overall sample temperature is increased stepwise. At each temperature T energy uptake of the sample and the formulation buffer reference is recorded. The difference in energy uptake Cp (kcal/mole/° C.) of the sample minus the reference is plotted against the respective temperature. The melting temperature is defined as the temperature at the first maximum of energy uptake.

[0168] The PSMA×CD3 bispecific antibody constructs of the invention are also envisaged to have a turbidity (as measured by OD340 after concentration of purified monomeric antibody construct to 2.5 mg/ml and over night incubation) of ≦0.2, preferably of ≦0.15, more preferably of ≦0.12, even more preferably of ≦0.1, and most preferably of ≦0.08.

[0169] In a further embodiment the antibody construct according to the invention is stable at physiologic or slightly lower pH, i.e., about pH 7.4 to 6.0. The more tolerant the antibody construct behaves at unphysiologic pH such as about pH 6.0, the higher is the recovery of the antibody construct eluted from an ion exchange column relative to the total amount of loaded protein. Recovery of the antibody construct from an ion (e.g., cation) exchange column at about pH 6.0 is preferably ≧30%, more preferably ≧40%, more preferably ≧50%, even more preferably ≧60%, even more preferably ≧70%, even more preferably ≧80%, even more preferably ≧90%, even more preferably ≧95%, and most preferably ≧99%.

[0170] It is furthermore envisaged that the bispecific antibody constructs of the present invention exhibit therapeutic efficacy or anti-tumor activity. This can e.g. be assessed in a study as disclosed in the following example of an advanced stage human tumor xenograft model:

[0171] On day 1 of the study, 5×10⁶ cells of a human target cell antigen (here: PSMA) positive cancer cell line are subcutaneously injected in the right dorsal flank of female NOD/SCID mice. When the mean tumor volume reaches about 100 mm³, in vitro expanded human CD3 positive T cells are transplanted into the mice by injection of about 2×10⁷ cells into the peritoneal cavity of the animals. Mice of vehicle control group 1 do not receive effector cells and are used as an untransplanted control for comparison with vehicle control group 2 (receiving effector cells) to monitor the impact of T cells alone on tumor growth. The antibody treatment starts when the mean tumor volume reaches about 200 mm³. The mean tumor size of each treatment group on the day of treatment start should not be statistically different from any other group (analysis of variance). Mice are treated with 0.5 mg/kg/day of a PSMA×CD3 bispecifc antibody construct by intravenous bolus injection for about 15 to 20 days. Tumors are measured by caliper during the study and progress evaluated by intergroup comparison of tumor volumes (TV). The tumor growth inhibition T/C [%] is determined by calculating TV as T/C %=100×(median TV of analyzed group)/(median TV of control group 2).

[0172] The skilled person knows how to modify or adapt certain parameters of this study, such as the number of injected tumor cells, the site of injection, the number of transplanted human T cells, the amount of bispecific antibody constructs to be administered, and the timelines, while still arriving at a meaningful and reproducible result. Preferably, the tumor growth inhibition T/C [%] is ≦70 or ≦60, more preferably ≦50 or ≦40, even more preferably ≦30 or ≦20 and most preferably ≦10 or ≦5 or even ≦2.5.

[0173] In a preferred embodiment of the antibody construct of the invention the antibody construct is a single chain antibody construct.

[0174] Also in a preferred embodiment of the antibody construct of the invention said third domain comprises in an amino to carboxyl order:
[0175] hinge-CH2-CH3-linker-hinge-CH2-CH3.

[0176] In one embodiment of the invention each of said polypeptide monomers of the third domain has an amino acid sequence that is at least 90% identical to a sequence selected from the group consisting of: SEQ ID NO: 17-24. In a preferred embodiment or the invention each of said polypeptide monomers has an amino acid sequence selected from SEQ ID NO: 17-24.

[0177] Also in one embodiment of the invention the CH2 domain of one or preferably each (both) polypeptide monomers of the third domain comprises an intra domain cysteine disulfide bridge. As known in the art the term “cysteine disulfide bridge” refers to a functional group with the general structure R—S—S—R. The linkage is also called an SS-bond or a disulfide bridge and is derived by the coupling of two thiol groups of cysteine residues. It is particularly preferred for the antibody construct of the invention that the cysteines forming the cysteine disulfide bridge in the mature antibody construct are introduced into the amino acid sequence of the CH2 domain corresponding to 309 and 321 (Kabat numbering).

[0178] In one embodiment of the invention a glycosylation site in Kabat position 314 of the CH2 domain is removed. It is preferred that this removal of the glycosylation site is achieved by a N314X substitution, wherein X is any amino acid excluding Q. Said substitution is preferably a N314G substitution N314G substitution. In a more preferred embodiment, said CH2 domain additionally comprises the following substitutions (position according to Kabat) V321C and R309C (these substitutions introduce the intra domain cysteine disulfide bridge at Kabat positions 309 and 321).

[0179] It is assumed that the preferred features of the antibody construct of the invention compared e.g. to the bispecific heteroFc antibody construct known in the art (FIG. 1B) may be inter alia related to the introduction of the above described modifications in the CH2 domain. Thus, it is preferred for the construct of the invention that the CH2 domains in the third domain of the antibody construct of the invention comprise the intra domain cysteine disulfide bridge at Kabat positions 309 and 321 and/or the glycosylation site at Kabat position 314 is removed by a N314G N314X substitution as above, preferably by a N314G substitution.

[0180] In a further preferred embodiment of the invention the CH2 domains in the third domain of the antibody construct of the invention comprise the intra domain cysteine disulfide bridge at Kabat positions 309 and 321 and the glycosylation site at Kabat position 314 is removed by a N314G substitution. Most preferably, the polypeptide monomer of the third domain of the antibody construct of the invention has an amino acid sequence selected from the group consisting of SEQ ID NO: 17 and 18.

[0181] In one embodiment the invention provides an antibody construct, wherein:
[0182] (i) the first domain comprises two antibody variable domains and the second domain comprises two antibody variable domains;
[0183] (ii) the first domain comprises one antibody variable domain and the second domain comprises two antibody variable domains;
[0184] (iii) the first domain comprises two antibody variable domains and the second domain comprises one antibody variable domain; or
[0185] (iv) the first domain comprises one antibody variable domain and the second domain comprises one antibody variable domain.

[0186] Accordingly, the first and the second domain may be binding domains comprising each two antibody variable domains such as a VH and a VL domain. Examples for such binding domains comprising two antibody variable domains where described herein above and comprise e.g. Fv fragments, scFv fragments or Fab fragments described herein above. Alternatively either one or both of those binding domains may comprise only a single variable domain. Examples for such single domain binding domains where described herein above and comprise e.g. nanobodies or single variable domain antibodies comprising merely one variable domain, which may be VHH, VH or VL, that specifically bind an antigen or epitope independently of other V regions or domains.

[0187] In a preferred embodiment of the antibody construct of the invention first and second domain are fused to the third domain via a peptide linker. Preferred peptide linker have been described herein above and are characterized by the amino acid sequence Gly-Gly-Gly-Gly-Ser, i.e. Gly₄Ser (SEQ ID NO: 1), or polymers thereof, i.e. (Gly₄Ser)x, where x is an integer of 1 or greater (e.g. 2 or 3). A particularly preferred linker for the fusion of the first and second domain to the third domain is depicted in SEQ ID NOs: 1.

[0188] In a preferred embodiment the antibody construct of the invention is characterized to comprise in an amino to carboxyl order:
[0189] (a) the first domain;
[0190] (b) a peptide linker having an amino acid sequence selected from the group consisting of SEQ ID NOs: 1-3;
[0191] (c) the second domain;
[0192] (d) a peptide linker having an amino acid sequence selected from the group consisting of SEQ ID NO: 1, 2, 3, 9, 10, 11 and 12;
[0193] (e) the first polypeptide monomer of the third domain;
[0194] (f) a peptide linker having an amino acid sequence selected from the group consisting of SEQ ID NOs: 5, 6, 7 and 8; and
[0195] (g) the second polypeptide monomer of the third domain.

[0196] The antibody construct of the present invention comprises a first domain which binds to PSMA, preferably to the extracellular domain (ECD) of PSMA. It is understood that the term “binding to the extracellular domain of PSMA”, in the context of the present invention, implies that the binding domain binds to PSMA expressed on the surface of a target cell. The first domain according to the invention hence preferably binds to PSMA when it is expressed by naturally expressing cells or cell lines, and/or by cells or cell lines transformed or (stably/transiently) transfected with PSMA. In a preferred embodiment the first binding domain also binds to PSMA when PSMA is used as a “target” or “ligand” molecule in an in vitro binding assay such as BIAcore or Scatchard. The “target cell” can be any prokaryotic or eukaryotic cell expressing PSMA on its surface; preferably the target cell is a cell that is part of the human or animal body, such as a specific PSMA expressing cancer or tumor cell.

[0197] Preferably, the first binding domain binds to human PSMA/PSMA ECD. In a further preferred embodiment, it binds to macaque PSMA/PSMA ECD. According to the most preferred embodiment, it binds to both the human and the macaque PSMA/PSMA ECD. The “PSMA extracellular domain” or “PSMA ECD” refers to the PSMA region or sequence which is essentially free of transmembrane and cytoplasmic domains of PSMA. It will be understood by the skilled artisan that the transmembrane domain identified for the PSMA polypeptide of the present invention is identified pursuant to criteria routinely employed in the art for identifying that type of hydrophobic domain. The exact boundaries of a transmembrane domain may vary but most likely by no more than about 5 amino acids at either end of the domain specifically mentioned herein.

[0198] Preferred binding domains which bind to PSMA are disclosed in WO 2010/037836, and WO 2011/121110. Any binding domain for PSMA described in these applications may be used in the context of the present invention.

[0199] In one aspect of the invention the antibody construct comprises in an amino to carboxyl order:
[0200] (a) the first domain having an amino acid sequence selected from the group consisting of SEQ ID NOs: 50, 56, 68, 74, 86, 92, 104, 110, 122, 128, 140, 146, 158, 164, 176, 182, 194, 200, 212, 218, 230, 236, 248, 254, 266, 272, 284, 290, 302, 308, 320, 335, 350, 365, 380, 395, 410, 425, 440, 455, 470;
[0201] (b) a peptide linker having an amino acid sequence selected from the group consisting of SEQ ID NOs: 1-3;
[0202] (c) the second domain having an amino acid sequence selected from the group consisting of SEQ ID NOs: 23, 25, 41, 43, 59, 61, 77, 79, 95, 97, 113, 115, 131, 133, 149, 151, 167, 169, 185 or 187 of WO 2008/119567 or as depicted in SEQ ID NO: 15;
[0203] (d) a peptide linker having an amino acid sequence selected from the group consisting of SEQ ID NOs: 1, 2, 3, 9, 10, 11 and 12;
[0204] (e) the first polypeptide monomer of the third domain having a polypeptide sequence selected from the group consisting of SEQ ID NOs: 17-24;
[0205] (f) a peptide linker having an amino acid sequence selected from the group consisting of SEQ ID NOs: 5, 6, 7 and 8; and
[0206] (g) the second polypeptide monomer of the third domain having a polypeptide sequence selected from the group consisting of SEQ ID NOs: 17-24.

[0207] In line with this preferred embodiment, the first and second domain which are fused via a peptide linker to a single chain polypeptide comprise a sequence selected from the group consisting of: SEQ ID NO: 51, 57, 69, 75, 87, 93, 105, 111, 123, 129, 141, 147, 159, 165, 177, 183, 195, 201, 213, 219, 231, 237, 249, 255, 267, 273, 285, 291, 303, 309, 321, 324, 336, 339, 351, 354, 366, 369, 381, 384, 396, 399, 411, 414, 426, 429, 441, 444, 456, 459, 471 and 474.

[0208] In one aspect the antibody construct of the invention is characterized by having an amino acid sequence selected from the group consisting of: SEQ ID NOs: 52, 53, 58, 59, 70, 71, 76, 77, 88, 89, 94, 95, 106, 107, 112, 113, 124, 125, 130, 131, 142, 143, 148, 149, 160, 161, 166, 167, 178, 179, 184, 185, 196, 197, 202, 203, 214, 215, 220, 221, 232, 233, 238, 239, 250, 251, 256, 257, 268, 269, 274, 275, 286, 287, 292, 293, 304 305, 310, 311, 322, 323, 325, 326, 337, 338, 340, 341, 352, 353, 355, 356, 367, 368, 370, 371, 382, 383, 385, 386, 397, 398, 400, 401, 412, 413, 415, 416, 427, 428, 430, 431, 442, 443, 445, 446, 457, 458, 460, 461, 472, 473, 475 and 476.

[0209] The invention further provides a polynucleotide/nucleic acid molecule encoding an antibody construct of the invention. A polynucleotide is a biopolymer composed of 13 or more nucleotide monomers covalently bonded in a chain. DNA (such as cDNA) and RNA (such as mRNA) are examples of polynucleotides with distinct biological function. Nucleotides are organic molecules that serve as the monomers or subunits of nucleic acid molecules like DNA or RNA. The nucleic acid molecule or polynucleotide can be double stranded and single stranded, linear and circular. It is preferably comprised in a vector which is preferably comprised in a host cell. Said host cell is, e.g. after transformation or transfection with the vector or the polynucleotide of the invention, capable of expressing the antibody construct. For that purpose the polynucleotide or nucleic acid molecule is operatively linked with control sequences.

[0210] The genetic code is the set of rules by which information encoded within genetic material (nucleic acids) is translated into proteins. Biological decoding in living cells is accomplished by the ribosome which links amino acids in an order specified by mRNA, using tRNA molecules to carry amino acids and to read the mRNA three nucleotides at a time. The code defines how sequences of these nucleotide triplets, called codons, specify which amino acid will be added next during protein synthesis. With some exceptions, a three-nucleotide codon in a nucleic acid sequence specifies a single amino acid. Because the vast majority of genes are encoded with exactly the same code, this particular code is often referred to as the canonical or standard genetic code. While the genetic code determines the protein sequence for a given coding region, other genomic regions can influence when and where these proteins are produced.

[0211] Furthermore, the invention provides a vector comprising a polynucleotide/nucleic acid molecule of the invention. A vector is a nucleic acid molecule used as a vehicle to transfer (foreign) genetic material into a cell. The term “vector” encompasses—but is not restricted to—plasmids, viruses, cosmids and artificial chromosomes. In general, engineered vectors comprise an origin of replication, a multicloning site and a selectable marker. The vector itself is generally a nucleotide sequence, commonly a DNA sequence that comprises an insert (transgene) and a larger sequence that serves as the “backbone” of the vector. Modern vectors may encompass additional features besides the transgene insert and a backbone: promoter, genetic marker, antibiotic resistance, reporter gene, targeting sequence, protein purification tag. Vectors called expression vectors (expression constructs) specifically are for the expression of the transgene in the target cell, and generally have control sequences.

[0212] The term “control sequences” refers to DNA sequences necessary for the expression of an operably linked coding sequence in a particular host organism. The control sequences that are suitable for prokaryotes, for example, include a promoter, optionally an operator sequence, and a ribosome binding side. Eukaryotic cells are known to utilize promoters, polyadenylation signals, and enhancers.

[0213] A nucleic acid is “operably linked” when it is placed into a functional relationship with another nucleic acid sequence. For example, DNA for a presequence or secretory leader is operably linked to DNA for a polypeptide if it is expressed as a preprotein that participates in the secretion of the polypeptide; a promoter or enhancer is operably linked to a coding sequence if it affects the transcription of the sequence; or a ribosome binding side is operably linked to a coding sequence if it is positioned so as to facilitate translation. Generally, “operably linked” means that the DNA sequences being linked are contiguous, and, in the case of a secretory leader, contiguous and in reading phase. However, enhancers do not have to be contiguous. Linking is accomplished by ligation at convenient restriction sites. If such sites do not exist, the synthetic oligonucleotide adaptors or linkers are used in accordance with conventional practice.

[0214] “Transfection” is the process of deliberately introducing nucleic acid molecules or polynucleotides (including vectors) into target cells. The term is mostly used for non-viral methods in eukaryotic cells. Transduction is often used to describe virus-mediated transfer of nucleic acid molecules or polynucleotides. Transfection of animal cells typically involves opening transient pores or “holes” in the cell membrane, to allow the uptake of material. Transfection can be carried out using calcium phosphate, by electroporation, by cell squeezing or by mixing a cationic lipid with the material to produce liposomes, which fuse with the cell membrane and deposit their cargo inside.

[0215] The term “transformation” is used to describe non-viral transfer of nucleic acid molecules or polynucleotides (including vectors) into bacteria, and also into non-animal eukaryotic cells, including plant cells. Transformation is hence the genetic alteration of a bacterial or non-animal eukaryotic cell resulting from the direct uptake through the cell membrane(s) from its surroundings and subsequent incorporation of exogenous genetic material (nucleic acid molecules). Transformation can be effected by artificial means. For transformation to happen, cells or bacteria must be in a state of competence, which may occur as a time-limited response to environmental conditions such as starvation and cell density.

[0216] Moreover, the invention provides a host cell transformed or transfected with the polynucleotide/nucleic acid molecule or with the vector of the invention. As used herein, the terms “host cell” or “recipient cell” are intended to include any individual cell or cell culture that can be or has/have been recipients of vectors, exogenous nucleic acid molecules, and polynucleotides encoding the antibody construct of the present invention; and/or recipients of the antibody construct itself. The introduction of the respective material into the cell is carried out by way of transformation, transfection and the like. The term “host cell” is also intended to include progeny or potential progeny of a single cell. Because certain modifications may occur in succeeding generations due to either natural, accidental, or deliberate mutation or due to environmental influences, such progeny may not, in fact, be completely identical (in morphology or in genomic or total DNA complement) to the parent cell, but is still included within the scope of the term as used herein. Suitable host cells include prokaryotic or eukaryotic cells, and also include but are not limited to bacteria, yeast cells, fungi cells, plant cells, and animal cells such as insect cells and mammalian cells, e.g., murine, rat, macaque or human.

[0217] The antibody construct of the invention can be produced in bacteria. After expression, the antibody construct of the invention is isolated from the E. coli cell paste in a soluble fraction and can be purified through, e.g., affinity chromatography and/or size exclusion. Final purification can be carried out similar to the process for purifying antibody expressed e.g., in CHO cells.

[0218] In addition to prokaryotes, eukaryotic microbes such as filamentous fungi or yeast are suitable cloning or expression hosts for the antibody construct of the invention. Saccharomyces cerevisiae, or common baker's yeast, is the most commonly used among lower eukaryotic host microorganisms. However, a number of other genera, species, and strains are commonly available and useful herein, such as Schizosaccharomyces pombe, Kluyveromyces hosts such as K. lactis, K. fragilis (ATCC 12424), K. bulgaricus (ATCC 16045), K. wickeramii (ATCC 24178), K. waltii (ATCC 56500), K. drosophilarum (ATCC 36906), K. thermotolerans, and K. marxianus; yarrowia (EP 402 226); Pichia pastoris (EP 183 070); Candida; Trichoderma reesia (EP 244 234); Neurospora crassa; Schwanniomyces such as Schwanniomyces occidentalis; and filamentous fungi such as Neurospora, Penicillium, Tolypocladium, and Aspergillus hosts such as A. nidulans and A. niger.

[0219] Suitable host cells for the expression of glycosylated antibody construct of the invention are derived from multicellular organisms. Examples of invertebrate cells include plant and insect cells. Numerous baculoviral strains and variants and corresponding permissive insect host cells from hosts such as Spodoptera frugiperda (caterpillar), Aedes aegypti (mosquito), Aedes albopictus (mosquito), Drosophila melanogaster (fruit fly), and Bombyx mori have been identified. A variety of viral strains for transfection are publicly available, e.g., the L-1 variant of Autographa californica NPV and the Bm-5 strain of Bombyx mori NPV, and such viruses may be used as the virus herein according to the present invention, particularly for transfection of Spodoptera frugiperda cells.

[0220] Plant cell cultures of cotton, corn, potato, soybean, petunia, tomato, Arabidopsis and tobacco can also be used as hosts. Cloning and expression vectors useful in the production of proteins in plant cell culture are known to those of skill in the art. See e.g. Hiatt et al., Nature (1989) 342: 76-78, Owen et al. (1992) Bio/Technology 10: 790-794, Artsaenko et al. (1995) The Plant J 8: 745-750, and Fecker et al. (1996) Plant Mol Biol 32: 979-986.

[0221] However, interest has been greatest in vertebrate cells, and propagation of vertebrate cells in culture (tissue culture) has become a routine procedure. Examples of useful mammalian host cell lines are monkey kidney CV1 line transformed by SV40 (COS-7, ATCC CRL 1651); human embryonic kidney line (293 or 293 cells subcloned for growth in suspension culture, Graham et al., J. Gen Virol. 36: 59 (1977)); baby hamster kidney cells (BHK, ATCC CCL 10); Chinese hamster ovary cells/−DHFR (CHO, Urlaub et al., Proc. Natl. Acad. Sci. USA 77: 4216 (1980)); mouse sertoli cells (TM4, Mather, Biol. Reprod. 23: 243-251 (1980)); monkey kidney cells (CVI ATCC CCL 70); African green monkey kidney cells (VERO-76, ATCC CRL1587); human cervical carcinoma cells (HELA, ATCC CCL 2); canine kidney cells (MDCK, ATCC CCL 34); buffalo rat liver cells (BRL 3A, ATCC CRL 1442); human lung cells (W138, ATCC CCL 75); human liver cells (Hep G2, 1413 8065); mouse mammary tumor (MMT 060562, ATCC CCL5 1); TRI cells (Mather et al., Annals N. Y Acad. Sci. (1982) 383: 44-68); MRC 5 cells; FS4 cells; and a human hepatoma line (Hep G2).

[0222] In a further embodiment the invention provides a process for the production of an antibody construct of the invention, said process comprising culturing a host cell of the invention under conditions allowing the expression of the antibody construct of the invention and recovering the produced antibody construct from the culture.

[0223] As used herein, the term “culturing” refers to the in vitro maintenance, differentiation, growth, proliferation and/or propagation of cells under suitable conditions in a medium. The term “expression” includes any step involved in the production of an antibody construct of the invention including, but not limited to, transcription, post-transcriptional modification, translation, post-translational modification, and secretion.

[0224] When using recombinant techniques, the antibody construct can be produced intracellularly, in the periplasmic space, or directly secreted into the medium. If the antibody construct is produced intracellularly, as a first step, the particulate debris, either host cells or lysed fragments, are removed, for example, by centrifugation or ultrafiltration. Carter et al., Bio/Technology 10: 163-167 (1992) describe a procedure for isolating antibodies which are secreted to the periplasmic space of E. coli. Briefly, cell paste is thawed in the presence of sodium acetate (pH 3.5), EDTA, and phenylmethylsulfonylfluoride (PMSF) over about 30 min. Cell debris can be removed by centrifugation. Where the antibody is secreted into the medium, supernatants from such expression systems are generally first concentrated using a commercially available protein concentration filter, for example, an Amicon or Millipore Pellicon ultrafiltration unit. A protease inhibitor such as PMSF may be included in any of the foregoing steps to inhibit proteolysis and antibiotics may be included to prevent the growth of adventitious contaminants.

[0225] The antibody construct of the invention prepared from the host cells can be recovered or purified using, for example, hydroxylapatite chromatography, gel electrophoresis, dialysis, and affinity chromatography. Other techniques for protein purification such as fractionation on an ion-exchange column, ethanol precipitation, Reverse Phase HPLC, chromatography on silica, chromatography on heparin SEPHAROSE™, chromatography on an anion or cation exchange resin (such as a polyaspartic acid column), chromato-focusing, SDS-PAGE, and ammonium sulfate precipitation are also available depending on the antibody to be recovered. Where the antibody construct of the invention comprises a CH3 domain, the Bakerbond ABX resin (J.T. Baker, Phillipsburg, N.J.) is useful for purification.

[0226] Affinity chromatography is a preferred purification technique. The matrix to which the affinity ligand is attached is most often agarose, but other matrices are available. Mechanically stable matrices such as controlled pore glass or poly (styrenedivinyl) benzene allow for faster flow rates and shorter processing times than can be achieved with agarose.

[0227] Moreover, the invention provides a pharmaceutical composition comprising an antibody construct of the invention or an antibody construct produced according to the process of the invention. It is preferred for the pharmaceutical composition of the invention that the homogeneity of the antibody construct is ≧80%, more preferably ≧81%, ≧82%, ≧83%, ≧84%, or ≧85%, further preferably ≧86%, ≧87%, ≧88%, ≧89%, or ≧90%, still further preferably, ≧91%, ≧92%, ≧93%, ≧94%, or ≧95% and most preferably ≧96%, ≧97%, ≧98% or ≧99%.

[0228] As used herein, the term “pharmaceutical composition” relates to a composition which is suitable for administration to a patient, preferably a human patient. The particularly preferred pharmaceutical composition of this invention comprises one or a plurality of the antibody construct(s) of the invention, preferably in a therapeutically effective amount. Preferably, the pharmaceutical composition further comprises suitable formulations of one or more (pharmaceutically effective) carriers, stabilizers, excipients, diluents, solubilizers, surfactants, emulsifiers, preservatives and/or adjuvants. Acceptable constituents of the composition are preferably nontoxic to recipients at the dosages and concentrations employed. Pharmaceutical compositions of the invention include, but are not limited to, liquid, frozen, and lyophilized compositions.

[0229] The inventive compositions may comprise a pharmaceutically acceptable carrier. In general, as used herein, “pharmaceutically acceptable carrier” means any and all aqueous and non-aqueous solutions, sterile solutions, solvents, buffers, e.g. phosphate buffered saline (PBS) solutions, water, suspensions, emulsions, such as oil/water emulsions, various types of wetting agents, liposomes, dispersion media and coatings, which are compatible with pharmaceutical administration, in particular with parenteral administration. The use of such media and agents in pharmaceutical compositions is well known in the art, and the compositions comprising such carriers can be formulated by well-known conventional methods.

[0230] Certain embodiments provide pharmaceutical compositions comprising the antibody construct of the invention and further one or more excipients such as those illustratively described in this section and elsewhere herein. Excipients can be used in the invention in this regard for a wide variety of purposes, such as adjusting physical, chemical, or biological properties of formulations, such as adjustment of viscosity, and or processes of the invention to improve effectiveness and or to stabilize such formulations and processes against degradation and spoilage due to, for instance, stresses that occur during manufacturing, shipping, storage, pre-use preparation, administration, and thereafter.

[0231] In certain embodiments, the pharmaceutical composition may contain formulation materials for the purpose of modifying, maintaining or preserving, e.g., the pH, osmolarity, viscosity, clarity, color, isotonicity, odor, sterility, stability, rate of dissolution or release, adsorption or penetration of the composition (see, REMINGTON'S PHARMACEUTICAL SCIENCES, 18″ Edition, (A. R. Genrmo, ed.), 1990, Mack Publishing Company). In such embodiments, suitable formulation materials may include, but are not limited to:
[0232] amino acids such as glycine, alanine, glutamine, asparagine, threonine, proline, 2-phenylalanine, including charged amino acids, preferably lysine, lysine acetate, arginine, glutamate and/or histidine
[0233] antimicrobials such as antibacterial and antifungal agents
[0234] antioxidants such as ascorbic acid, methionine, sodium sulfite or sodium hydrogen-sulfite;
[0235] buffers, buffer systems and buffering agents which are used to maintain the composition at physiological pH or at a slightly lower pH; examples of buffers are borate, bicarbonate, Tris-HCl, citrates, phosphates or other organic acids, succinate, phosphate, and histidine; for example Tris buffer of about pH 7.0-8.5;
[0236] non-aqueous solvents such as propylene glycol, polyethylene glycol, vegetable oils such as olive oil, and injectable organic esters such as ethyl oleate;
[0237] aqueous carriers including water, alcoholic/aqueous solutions, emulsions or suspensions, including saline and buffered media;
[0238] biodegradable polymers such as polyesters;
[0239] bulking agents such as mannitol or glycine;
[0240] chelating agents such as ethylenediamine tetraacetic acid (EDTA);
[0241] isotonic and absorption delaying agents;
[0242] complexing agents such as caffeine, polyvinylpyrrolidone, beta-cyclodextrin or hydroxypropyl-beta-cyclodextrin)
[0243] fillers;
[0244] monosaccharides; disaccharides; and other carbohydrates (such as glucose, mannose or dextrins); carbohydrates may be non-reducing sugars, preferably trehalose, sucrose, octasulfate, sorbitol or xylitol;
[0245] (low molecular weight) proteins, polypeptides or proteinaceous carriers such as human or bovine serum albumin, gelatin or immunoglobulins, preferably of human origin;
[0246] coloring and flavouring agents;
[0247] sulfur containing reducing agents, such as glutathione, thioctic acid, sodium thioglycolate, thioglycerol, [alpha]-monothioglycerol, and sodium thio sulfate
[0248] diluting agents;
[0249] emulsifying agents;
[0250] hydrophilic polymers such as polyvinylpyrrolidone)
[0251] salt-forming counter-ions such as sodium;
[0252] preservatives such as antimicrobials, anti-oxidants, chelating agents, inert gases and the like; examples are: benzalkonium chloride, benzoic acid, salicylic acid, thimerosal, phenethyl alcohol, methylparaben, propylparaben, chlorhexidine, sorbic acid or hydrogen peroxide);
[0253] metal complexes such as Zn-protein complexes;
[0254] solvents and co-solvents (such as glycerin, propylene glycol or polyethylene glycol);
[0255] sugars and sugar alcohols, such as trehalose, sucrose, octasulfate, mannitol, sorbitol or xylitol stachyose, mannose, sorbose, xylose, ribose, myoinisitose, galactose, lactitol, ribitol, myoinisitol, galactitol, glycerol, cyclitols (e.g., inositol), polyethylene glycol; and polyhydric sugar alcohols;
[0256] suspending agents;
[0257] surfactants or wetting agents such as pluronics, PEG, sorbitan esters, polysorbates such as polysorbate 20, polysorbate, triton, tromethamine, lecithin, cholesterol, tyloxapal; surfactants may be detergents, preferably with a molecular weight of >1.2 KD and/or a polyether, preferably with a molecular weight of >3 KD; non-limiting examples for preferred detergents are Tween 20, Tween 40, Tween 60, Tween 80 and Tween 85; non-limiting examples for preferred polyethers are PEG 3000, PEG 3350, PEG 4000 and PEG 5000;
[0258] stability enhancing agents such as sucrose or sorbitol;
[0259] tonicity enhancing agents such as alkali metal halides, preferably sodium or potassium chloride, mannitol sorbitol;
[0260] parenteral delivery vehicles including sodium chloride solution, Ringer's dextrose, dextrose and sodium chloride, lactated Ringer's, or fixed oils;
[0261] intravenous delivery vehicles including fluid and nutrient replenishers, electrolyte replenishers (such as those based on Ringer's dextrose).

[0262] It is evident to those skilled in the art that the different constituents of the pharmaceutical composition (e.g., those listed above) can have different effects, for example, and amino acid can act as a buffer, a stabilizer and/or an antioxidant; mannitol can act as a bulking agent and/or a tonicity enhancing agent; sodium chloride can act as delivery vehicle and/or tonicity enhancing agent; etc.

[0263] It is envisaged that the composition of the invention may comprise, in addition to the polypeptide of the invention defined herein, further biologically active agents, depending on the intended use of the composition. Such agents may be drugs acting on the gastrointestinal system, drugs acting as cytostatica, drugs preventing hyperurikemia, drugs inhibiting immunoreactions (e.g. corticosteroids), drugs modulating the inflammatory response, drugs acting on the circulatory system and/or agents such as cytokines known in the art. It is also envisaged that the antibody construct of the present invention is applied in a co-therapy, i.e., in combination with another anti-cancer medicament.

[0264] In certain embodiments, the optimal pharmaceutical composition will be determined by one skilled in the art depending upon, for example, the intended route of administration, delivery format and desired dosage. See, for example, REMINGTON'S PHARMACEUTICAL SCIENCES, supra. In certain embodiments, such compositions may influence the physical state, stability, rate of in vivo release and rate of in vivo clearance of the antibody construct of the invention. In certain embodiments, the primary vehicle or carrier in a pharmaceutical composition may be either aqueous or non-aqueous in nature. For example, a suitable vehicle or carrier may be water for injection, physiological saline solution or artificial cerebrospinal fluid, possibly supplemented with other materials common in compositions for parenteral administration. Neutral buffered saline or saline mixed with serum albumin are further exemplary vehicles. In certain embodiments, the antibody construct of the invention compositions may be prepared for storage by mixing the selected composition having the desired degree of purity with optional formulation agents (REMINGTON'S PHARMACEUTICAL SCIENCES, supra) in the form of a lyophilized cake or an aqueous solution. Further, in certain embodiments, the antibody construct of the invention may be formulated as a lyophilizate using appropriate excipients such as sucrose.

[0265] When parenteral administration is contemplated, the therapeutic compositions for use in this invention may be provided in the form of a pyrogen-free, parenterally acceptable aqueous solution comprising the desired antibody construct of the invention in a pharmaceutically acceptable vehicle. A particularly suitable vehicle for parenteral injection is sterile distilled water in which the antibody construct of the invention is formulated as a sterile, isotonic solution, properly preserved. In certain embodiments, the preparation can involve the formulation of the desired molecule with an agent, such as injectable microspheres, bio-erodible particles, polymeric compounds (such as polylactic acid or polyglycolic acid), beads or liposomes, that may provide controlled or sustained release of the product which can be delivered via depot injection. In certain embodiments, hyaluronic acid may also be used, having the effect of promoting sustained duration in the circulation. In certain embodiments, implantable drug delivery devices may be used to introduce the desired antibody construct.

[0266] Additional pharmaceutical compositions will be evident to those skilled in the art, including formulations involving the antibody construct of the invention in sustained- or controlled-delivery/release formulations. Techniques for formulating a variety of other sustained- or controlled-delivery means, such as liposome carriers, bio-erodible microparticles or porous beads and depot injections, are also known to those skilled in the art. See, for example, International Patent Application No. PCT/US93/00829, which describes controlled release of porous polymeric microparticles for delivery of pharmaceutical compositions. Sustained-release preparations may include semipermeable polymer matrices in the form of shaped articles, e.g., films, or microcapsules. Sustained release matrices may include polyesters, hydrogels, polylactides (as disclosed in U.S. Pat. No. 3,773,919 and European Patent Application Publication No. EP 058481), copolymers of L-glutamic acid and gamma ethyl-L-glutamate (Sidman et al., 1983, Biopolymers 2:547-556), poly (2-hydroxyethyl-methacrylate) (Langer et al., 1981, J. Biomed. Mater. Res. 15:167-277 and Langer, 1982, Chem. Tech. 12:98-105), ethylene vinyl acetate (Langer et al., 1981, supra) or poly-D(−)-3-hydroxybutyric acid (European Patent Application Publication No. EP 133,988). Sustained release compositions may also include liposomes that can be prepared by any of several methods known in the art. See, e.g., Eppstein et al., 1985, Proc. Natl. Acad. Sci. U.S.A. 82:3688-3692; European Patent Application Publication Nos. EP 036,676; EP 088,046 and EP 143,949.

[0267] The antibody construct may also be entrapped in microcapsules prepared, for example, by coacervation techniques or by interfacial polymerization (for example, hydroxymethylcellulose or gelatine-microcapsules and poly (methylmethacylate) microcapsules, respectively), in colloidal drug delivery systems (for example, liposomes, albumin microspheres, microemulsions, nanoparticles and nanocapsules), or in macroemulsions. Such techniques are disclosed in Remington's Pharmaceutical Sciences, 16th edition, Oslo, A., Ed., (1980).

[0268] Pharmaceutical compositions used for in vivo administration are typically provided as sterile preparations. Sterilization can be accomplished by filtration through sterile filtration membranes. When the composition is lyophilized, sterilization using this method may be conducted either prior to or following lyophilization and reconstitution. Compositions for parenteral administration can be stored in lyophilized form or in a solution. Parenteral compositions generally are placed into a container having a sterile access port, for example, an intravenous solution bag or vial having a stopper pierceable by a hypodermic injection needle.

[0269] Another aspect of the invention includes self-buffering antibody construct of the invention formulations, which can be used as pharmaceutical compositions, as described in international patent application WO 06138181A2 (PCT/US2006/022599). A variety of expositions are available on protein stabilization and formulation materials and methods useful in this regard, such as Arakawa et al., “Solvent interactions in pharmaceutical formulations,” Pharm Res. 8(3): 285-91 (1991); Kendrick et al., “Physical stabilization of proteins in aqueous solution” in: RATIONAL DESIGN OF STABLE PROTEIN FORMULATIONS: THEORY AND PRACTICE, Carpenter and Manning, eds. Pharmaceutical Biotechnology. 13: 61-84 (2002), and Randolph et al., “Surfactant-protein interactions”, Pharm Biotechnol. 13: 159-75 (2002), see particularly the parts pertinent to excipients and processes of the same for self-buffering protein formulations in accordance with the current invention, especially as to protein pharmaceutical products and processes for veterinary and/or human medical uses.

[0270] Salts may be used in accordance with certain embodiments of the invention to, for example, adjust the ionic strength and/or the isotonicity of a formulation and/or to improve the solubility and/or physical stability of a protein or other ingredient of a composition in accordance with the invention. As is well known, ions can stabilize the native state of proteins by binding to charged residues on the protein's surface and by shielding charged and polar groups in the protein and reducing the strength of their electrostatic interactions, attractive, and repulsive interactions. Ions also can stabilize the denatured state of a protein by binding to, in particular, the denatured peptide linkages (—CONH) of the protein. Furthermore, ionic interaction with charged and polar groups in a protein also can reduce intermolecular electrostatic interactions and, thereby, prevent or reduce protein aggregation and insolubility.

[0271] Ionic species differ significantly in their effects on proteins. A number of categorical rankings of ions and their effects on proteins have been developed that can be used in formulating pharmaceutical compositions in accordance with the invention. One example is the Hofmeister series, which ranks ionic and polar non-ionic solutes by their effect on the conformational stability of proteins in solution. Stabilizing solutes are referred to as “kosmotropic”. Destabilizing solutes are referred to as “chaotropic”. Kosmotropes commonly are used at high concentrations (e.g., >1 molar ammonium sulfate) to precipitate proteins from solution (“salting-out”). Chaotropes commonly are used to denture and/or to solubilize proteins (“salting-in”). The relative effectiveness of ions to “salt-in” and “salt-out” defines their position in the Hofmeister series.

[0272] Free amino acids can be used in the antibody construct of the invention formulations in accordance with various embodiments of the invention as bulking agents, stabilizers, and antioxidants, as well as other standard uses. Lysine, proline, serine, and alanine can be used for stabilizing proteins in a formulation. Glycine is useful in lyophilization to ensure correct cake structure and properties. Arginine may be useful to inhibit protein aggregation, in both liquid and lyophilized formulations. Methionine is useful as an antioxidant.

[0273] Polyols include sugars, e.g., mannitol, sucrose, and sorbitol and polyhydric alcohols such as, for instance, glycerol and propylene glycol, and, for purposes of discussion herein, polyethylene glycol (PEG) and related substances. Polyols are kosmotropic. They are useful stabilizing agents in both liquid and lyophilized formulations to protect proteins from physical and chemical degradation processes. Polyols also are useful for adjusting the tonicity of formulations. Among polyols useful in select embodiments of the invention is mannitol, commonly used to ensure structural stability of the cake in lyophilized formulations. It ensures structural stability to the cake. It is generally used with a lyoprotectant, e.g., sucrose. Sorbitol and sucrose are among preferred agents for adjusting tonicity and as stabilizers to protect against freeze-thaw stresses during transport or the preparation of bulks during the manufacturing process. Reducing sugars (which contain free aldehyde or ketone groups), such as glucose and lactose, can glycate surface lysine and arginine residues. Therefore, they generally are not among preferred polyols for use in accordance with the invention. In addition, sugars that form such reactive species, such as sucrose, which is hydrolyzed to fructose and glucose under acidic conditions, and consequently engenders glycation, also is not among preferred polyols of the invention in this regard. PEG is useful to stabilize proteins and as a cryoprotectant and can be used in the invention in this regard.

[0274] Embodiments of the antibody construct of the invention formulations further comprise surfactants. Protein molecules may be susceptible to adsorption on surfaces and to denaturation and consequent aggregation at air-liquid, solid-liquid, and liquid-liquid interfaces. These effects generally scale inversely with protein concentration. These deleterious interactions generally scale inversely with protein concentration and typically are exacerbated by physical agitation, such as that generated during the shipping and handling of a product. Surfactants routinely are used to prevent, minimize, or reduce surface adsorption. Useful surfactants in the invention in this regard include polysorbate 20, polysorbate 80, other fatty acid esters of sorbitan polyethoxylates, and poloxamer 188. Surfactants also are commonly used to control protein conformational stability. The use of surfactants in this regard is protein-specific since, any given surfactant typically will stabilize some proteins and destabilize others.

[0275] Polysorbates are susceptible to oxidative degradation and often, as supplied, contain sufficient quantities of peroxides to cause oxidation of protein residue side-chains, especially methionine. Consequently, polysorbates should be used carefully, and when used, should be employed at their lowest effective concentration. In this regard, polysorbates exemplify the general rule that excipients should be used in their lowest effective concentrations.

[0276] Embodiments of the antibody construct of the invention formulations further comprise one or more antioxidants. To some extent deleterious oxidation of proteins can be prevented in pharmaceutical formulations by maintaining proper levels of ambient oxygen and temperature and by avoiding exposure to light. Antioxidant excipients can be used as well to prevent oxidative degradation of proteins. Among useful antioxidants in this regard are reducing agents, oxygen/free-radical scavengers, and chelating agents. Antioxidants for use in therapeutic protein formulations in accordance with the invention preferably are water-soluble and maintain their activity throughout the shelf life of a product. EDTA is a preferred antioxidant in accordance with the invention in this regard. Antioxidants can damage proteins. For instance, reducing agents, such as glutathione in particular, can disrupt intramolecular disulfide linkages. Thus, antioxidants for use in the invention are selected to, among other things, eliminate or sufficiently reduce the possibility of themselves damaging proteins in the formulation.

[0277] Formulations in accordance with the invention may include metal ions that are protein co-factors and that are necessary to form protein coordination complexes, such as zinc necessary to form certain insulin suspensions. Metal ions also can inhibit some processes that degrade proteins. However, metal ions also catalyze physical and chemical processes that degrade proteins. Magnesium ions (10-120 mM) can be used to inhibit isomerization of aspartic acid to isoaspartic acid. Ca⁺² ions (up to 100 mM) can increase the stability of human deoxyribonuclease. Mg⁺², Mn⁺², and Zn⁺², however, can destabilize rhDNase. Similarly, Ca⁺² and Sr⁺² can stabilize Factor VIII, it can be destabilized by Mg⁺², Mn⁺² and Zn⁺², Cu⁺² and Fe⁺², and its aggregation can be increased by Al⁺³ ions.

[0278] Embodiments of the antibody construct of the invention formulations further comprise one or more preservatives. Preservatives are necessary when developing multi-dose parenteral formulations that involve more than one extraction from the same container. Their primary function is to inhibit microbial growth and ensure product sterility throughout the shelf-life or term of use of the drug product. Commonly used preservatives include benzyl alcohol, phenol and m-cresol. Although preservatives have a long history of use with small-molecule parenterals, the development of protein formulations that includes preservatives can be challenging. Preservatives almost always have a destabilizing effect (aggregation) on proteins, and this has become a major factor in limiting their use in multi-dose protein formulations. To date, most protein drugs have been formulated for single-use only. However, when multi-dose formulations are possible, they have the added advantage of enabling patient convenience, and increased marketability. A good example is that of human growth hormone (hGH) where the development of preserved formulations has led to commercialization of more convenient, multi-use injection pen presentations. At least four such pen devices containing preserved formulations of hGH are currently available on the market. Norditropin (liquid, Novo Nordisk), Nutropin AQ (liquid, Genentech) & Genotropin (lyophilized—dual chamber cartridge, Pharmacia & Upjohn) contain phenol while Somatrope (Eli Lilly) is formulated with m-cresol. Several aspects need to be considered during the formulation and development of preserved dosage forms. The effective preservative concentration in the drug product must be optimized. This requires testing a given preservative in the dosage form with concentration ranges that confer anti-microbial effectiveness without compromising protein stability.

[0279] As may be expected, development of liquid formulations containing preservatives are more challenging than lyophilized formulations. Freeze-dried products can be lyophilized without the preservative and reconstituted with a preservative containing diluent at the time of use. This shortens the time for which a preservative is in contact with the protein, significantly minimizing the associated stability risks. With liquid formulations, preservative effectiveness and stability should be maintained over the entire product shelf-life (about 18 to 24 months). An important point to note is that preservative effectiveness should be demonstrated in the final formulation containing the active drug and all excipient components.

[0280] The antibody constructs disclosed herein may also be formulated as immuno-liposomes. A “liposome” is a small vesicle composed of various types of lipids, phospholipids and/or surfactant which is useful for delivery of a drug to a mammal. The components of the liposome are commonly arranged in a bilayer formation, similar to the lipid arrangement of biological membranes. Liposomes containing the antibody construct are prepared by methods known in the art, such as described in Epstein et al., Proc. Natl. Acad. Sci. USA, 82: 3688 (1985); Hwang et al., Proc. Natl Acad. Sci. USA, 77: 4030 (1980); U.S. Pat. Nos. 4,485,045 and 4,544,545; and WO 97/38731. Liposomes with enhanced circulation time are disclosed in U.S. Pat. No. 5,013,556. Particularly useful liposomes can be generated by the reverse phase evaporation method with a lipid composition comprising phosphatidylcholine, cholesterol and PEG-derivatized phosphatidylethanolamine (PEG-PE). Liposomes are extruded through filters of defined pore size to yield liposomes with the desired diameter. Fab′ fragments of the antibody construct of the present invention can be conjugated to the liposomes as described in Martin et al. J. Biol. Chem. 257: 286-288 (1982) via a disulfide interchange reaction. A chemotherapeutic agent is optionally contained within the liposome. See Gabizon et al. J. National Cancer Inst. 81 (19) 1484 (1989).

[0281] Once the pharmaceutical composition has been formulated, it may be stored in sterile vials as a solution, suspension, gel, emulsion, solid, crystal, or as a dehydrated or lyophilized powder. Such formulations may be stored either in a ready-to-use form or in a form (e.g., lyophilized) that is reconstituted prior to administration.

[0282] The biological activity of the pharmaceutical composition defined herein can be determined for instance by cytotoxicity assays, as described in the following examples, in WO99/54440 or by Schlereth et al. (Cancer Immunol. Immunother. 20 (2005), 1-12). “Efficacy” or “in vivo efficacy” as used herein refers to the response to therapy by the pharmaceutical composition of the invention, using e.g. standardized NCI response criteria. The success or in vivo efficacy of the therapy using a pharmaceutical composition of the invention refers to the effectiveness of the composition for its intended purpose, i.e. the ability of the composition to cause its desired effect, i.e. depletion of pathologic cells, e.g. tumor cells. The in vivo efficacy may be monitored by established standard methods for the respective disease entities including, but not limited to white blood cell counts, differentials, Fluorescence Activated Cell Sorting, bone marrow aspiration. In addition, various disease specific clinical chemistry parameters and other established standard methods may be used. Furthermore, computer-aided tomography, X-ray, nuclear magnetic resonance tomography (e.g. for National Cancer Institute-criteria based response assessment [Cheson B D, Horning S J, Coiffier B, Shipp M A, Fisher R I, Connors J M, Lister T A, Vose J, Grillo-Lopez A, Hagenbeek A, Cabanillas F, Klippensten D, Hiddemann W, Castellino R, Harris N L, Armitage J O, Carter W, Hoppe R, Canellos G P. Report of an international workshop to standardize response criteria for non-Hodgkin's lymphomas. NCI Sponsored International Working Group. J Clin Oncol. 1999 April; 17(4):1244]), positron-emission tomography scanning, white blood cell counts, differentials, Fluorescence Activated Cell Sorting, bone marrow aspiration, lymph node biopsies/histologies, and various lymphoma specific clinical chemistry parameters (e.g. lactate dehydrogenase) and other established standard methods may be used.

[0283] Another major challenge in the development of drugs such as the pharmaceutical composition of the invention is the predictable modulation of pharmacokinetic properties. To this end, a pharmacokinetic profile of the drug candidate, i.e. a profile of the pharmacokinetic parameters that affect the ability of a particular drug to treat a given condition, can be established. Pharmacokinetic parameters of the drug influencing the ability of a drug for treating a certain disease entity include, but are not limited to: half-life, volume of distribution, hepatic first-pass metabolism and the degree of blood serum binding. The efficacy of a given drug agent can be influenced by each of the parameters mentioned above. It is an envisaged characteristic of the antibody constructs of the present invention provided with the specific FC modality that they comprise, for example, differences in pharmacokinetic behavior. A half-life extended targeting antibody construct according to the present invention preferably shows a surprisingly increased residence time in vivo in comparison to “canonical” non-HLE versions of said antibody construct.

[0284] “Half-life” means the time where 50% of an administered drug are eliminated through biological processes, e.g. metabolism, excretion, etc. By “hepatic first-pass metabolism” is meant the propensity of a drug to be metabolized upon first contact with the liver, i.e. during its first pass through the liver. “Volume of distribution” means the degree of retention of a drug throughout the various compartments of the body, like e.g. intracellular and extracellular spaces, tissues and organs, etc. and the distribution of the drug within these compartments. “Degree of blood serum binding” means the propensity of a drug to interact with and bind to blood serum proteins, such as albumin, leading to a reduction or loss of biological activity of the drug.

[0285] Pharmacokinetic parameters also include bioavailability, lag time (Tlag), Tmax, absorption rates, more onset and/or Cmax for a given amount of drug administered. “Bioavailability” means the amount of a drug in the blood compartment. “Lag time” means the time delay between the administration of the drug and its detection and measurability in blood or plasma. “Tmax” is the time after which maximal blood concentration of the drug is reached, and “Cmax” is the blood concentration maximally obtained with a given drug. The time to reach a blood or tissue concentration of the drug which is required for its biological effect is influenced by all parameters. Pharmacokinetic parameters of bispecific antibody constructs exhibiting cross-species specificity, which may be determined in preclinical animal testing in non-chimpanzee primates as outlined above, are also set forth e.g. in the publication by Schlereth et al. (Cancer Immunol. Immunother. 20 (2005), 1-12).

[0286] In a preferred aspect of the invention the pharmaceutical composition is stable for at least four weeks at about −20° C. As apparent from the appended examples the quality of an antibody construct of the invention vs. the quality of corresponding state of the art antibody constructs may be tested using different systems. Those tests are understood to be in line with the “ICH Harmonised Tripartite Guideline: Stability Testing of Biotechnological/Biological Products Q5C and Specifications: Test procedures and Acceptance Criteria for Biotech Biotechnological/Biological Products Q6B” and, thus are elected to provide a stability-indicating profile that provides certainty that changes in the identity, purity and potency of the product are detected. It is well accepted that the term purity is a relative term. Due to the effect of glycosylation, deamidation, or other heterogeneities, the absolute purity of a biotechnological/biological product should be typically assessed by more than one method and the purity value derived is method-dependent. For the purpose of stability testing, tests for purity should focus on methods for determination of degradation products.

[0287] For the assessment of the quality of a pharmaceutical composition comprising an antibody construct of the invention may be analyzed e.g. by analyzing the content of soluble aggregates in a solution (HMWS per size exclusion). It is preferred that stability for at least four weeks at about −20° C. is characterized by a content of less than 1.5% HMWS, preferably by less than 1% HMWS.

[0288] A preferred formulation for the antibody construct as a pharmaceutical composition may e.g. comprise the components of a formulation as described below:
[0289] Formulation:
[0290] potassium phosphate, L-arginine hydrochloride, trehalose dihydrate, polysorbate 80 at pH 6.0

[0291] Other examples for the assessment of the stability of an antibody construct of the invention in form of a pharmaceutical composition are provided in the appended examples 4-12. In those examples embodiments of antibody constructs of the invention are tested with respect to different stress conditions in different pharmaceutical formulations and the results compared with other half-life extending (HLE) formats of bispecific T cell engaging antibody construct known from the art. In general, it is envisaged that antibody constructs provided with the specific FC modality according to the present invention are typically more stable over a broad range of stress conditions such as temperature and light stress, both compared to antibody constructs provided with different HLE formats and without any HLE format (e.g. “canonical” antibody constructs). Said temperature stability may relate both to decreased (below room temperature including freezing) and increased (above room temperature including temperatures up to or above body temperature) temperature. As the person skilled in the art will acknowledge, such improved stability with regard to stress, which is hardly avoidable in clinical practice, makes the antibody construct safer because less degradation products will occur in clinical practice. In consequence, said increased stability means increased safety.

[0292] One embodiment provides the antibody construct of the invention or the antibody construct produced according to the process of the invention for use in the prevention, treatment or amelioration of a cancer correlating with PSMA expression or PSMA overexpression, such as prostate cancer.

[0293] The formulations described herein are useful as pharmaceutical compositions in the treatment, amelioration and/or prevention of the pathological medical condition as described herein in a patient in need thereof. The term “treatment” refers to both therapeutic treatment and prophylactic or preventative measures. Treatment includes the application or administration of the formulation to the body, an isolated tissue, or cell from a patient who has a disease/disorder, a symptom of a disease/disorder, or a predisposition toward a disease/disorder, with the purpose to cure, heal, alleviate, relieve, alter, remedy, ameliorate, improve, or affect the disease, the symptom of the disease, or the predisposition toward the disease.

[0294] The term “amelioration” as used herein refers to any improvement of the disease state of a patient having a disease as specified herein below, by the administration of an antibody construct according to the invention to a subject in need thereof. Such an improvement may also be seen as a slowing or stopping of the progression of the patient's disease. The term “prevention” as used herein means the avoidance of the occurrence or re-occurrence of a patient having a tumor or cancer or a metastatic cancer as specified herein below, by the administration of an antibody construct according to the invention to a subject in need thereof.

[0295] The term “disease” refers to any condition that would benefit from treatment with the antibody construct or the pharmaceutic composition described herein. This includes chronic and acute disorders or diseases including those pathological conditions that predispose the mammal to the disease in question.

[0296] A “neoplasm” is an abnormal growth of tissue, usually but not always forming a mass. When also forming a mass, it is commonly referred to as a “tumor”. Neoplasms or tumors or can be benign, potentially malignant (pre-cancerous), or malignant. Malignant neoplasms are commonly called cancer. They usually invade and destroy the surrounding tissue and may form metastases, i.e., they spread to other parts, tissues or organs of the body. Hence, the term “metatstatic cancer” encompasses metastases to other tissues or organs than the one of the original tumor. Lymphomas and leukemias are lymphoid neoplasms. For the purposes of the present invention, they are also encompassed by the terms “tumor” or “cancer”.

[0297] The term “viral disease” describes diseases, which are the result of a viral infection of a subject.

[0298] The term “immunological disorder” as used herein describes in line with the common definition of this term immunological disorders such as autoimmune diseases, hypersensitivities, immune deficiencies.

[0299] In one embodiment the invention provides a method for the treatment or amelioration of a cancer correlating with PSMA expression or PSMA overexpression, comprising the step of administering to a subject in need thereof the antibody construct of the invention, or the antibody construct produced according to the process of the invention. The PSMA×CD3 bispecific single chain antibody is particularly advantageous for the therapy of cancer, preferably solid tumors, more preferably carcinomas and prostate cancer.

[0300] The terms “subject in need” or those “in need of treatment” includes those already with the disorder, as well as those in which the disorder is to be prevented. The subject in need or “patient” includes human and other mammalian subjects that receive either prophylactic or therapeutic treatment.

[0301] The antibody construct of the invention will generally be designed for specific routes and methods of administration, for specific dosages and frequencies of administration, for specific treatments of specific diseases, with ranges of bio-availability and persistence, among other things. The materials of the composition are preferably formulated in concentrations that are acceptable for the site of administration.

[0302] Formulations and compositions thus may be designed in accordance with the invention for delivery by any suitable route of administration. In the context of the present invention, the routes of administration include, but are not limited to
[0303] topical routes (such as epicutaneous, inhalational, nasal, opthalmic, auricular/aural, vaginal, mucosal);
[0304] enteral routes (such as oral, gastrointestinal, sublingual, sublabial, buccal, rectal); and
[0305] parenteral routes (such as intravenous, intraarterial, intraosseous, intramuscular, intracerebral, intracerebroventricular, epidural, intrathecal, subcutaneous, intraperitoneal, extra-amniotic, intraarticular, intracardiac, intradermal, intralesional, intrauterine, intravesical, intravitreal, transdermal, intranasal, transmucosal, intrasynovial, intraluminal).

[0306] The pharmaceutical compositions and the antibody construct of this invention are particularly useful for parenteral administration, e.g., subcutaneous or intravenous delivery, for example by injection such as bolus injection, or by infusion such as continuous infusion. Pharmaceutical compositions may be administered using a medical device. Examples of medical devices for administering pharmaceutical compositions are described in U.S. Pat. Nos. 4,475,196; 4,439,196; 4,447,224; 4,447, 233; 4,486,194; 4,487,603; 4,596,556; 4,790,824; 4,941,880; 5,064,413; 5,312,335; 5,312,335; 5,383,851; and 5,399,163.

[0307] In particular, the present invention provides for an uninterrupted administration of the suitable composition. As a non-limiting example, uninterrupted or substantially uninterrupted, i.e. continuous administration may be realized by a small pump system worn by the patient for metering the influx of therapeutic agent into the body of the patient. The pharmaceutical composition comprising the antibody construct of the invention can be administered by using said pump systems. Such pump systems are generally known in the art, and commonly rely on periodic exchange of cartridges containing the therapeutic agent to be infused. When exchanging the cartridge in such a pump system, a temporary interruption of the otherwise uninterrupted flow of therapeutic agent into the body of the patient may ensue. In such a case, the phase of administration prior to cartridge replacement and the phase of administration following cartridge replacement would still be considered within the meaning of the pharmaceutical means and methods of the invention together make up one “uninterrupted administration” of such therapeutic agent.

[0308] The continuous or uninterrupted administration of the antibody constructs of the invention may be intravenous or subcutaneous by way of a fluid delivery device or small pump system including a fluid driving mechanism for driving fluid out of a reservoir and an actuating mechanism for actuating the driving mechanism. Pump systems for subcutaneous administration may include a needle or a cannula for penetrating the skin of a patient and delivering the suitable composition into the patient's body. Said pump systems may be directly fixed or attached to the skin of the patient independently of a vein, artery or blood vessel, thereby allowing a direct contact between the pump system and the skin of the patient. The pump system can be attached to the skin of the patient for 24 hours up to several days. The pump system may be of small size with a reservoir for small volumes. As a non-limiting example, the volume of the reservoir for the suitable pharmaceutical composition to be administered can be between 0.1 and 50 ml.

[0309] The continuous administration may also be transdermal by way of a patch worn on the skin and replaced at intervals. One of skill in the art is aware of patch systems for drug delivery suitable for this purpose. It is of note that transdermal administration is especially amenable to uninterrupted administration, as exchange of a first exhausted patch can advantageously be accomplished simultaneously with the placement of a new, second patch, for example on the surface of the skin immediately adjacent to the first exhausted patch and immediately prior to removal of the first exhausted patch. Issues of flow interruption or power cell failure do not arise.

[0310] If the pharmaceutical composition has been lyophilized, the lyophilized material is first reconstituted in an appropriate liquid prior to administration. The lyophilized material may be reconstituted in, e.g., bacteriostatic water for injection (BWFI), physiological saline, phosphate buffered saline (PBS), or the same formulation the protein had been in prior to lyophilization.

[0311] The compositions of the present invention can be administered to the subject at a suitable dose which can be determined e.g. by dose escalating studies by administration of increasing doses of the antibody construct of the invention exhibiting cross-species specificity described herein to non-chimpanzee primates, for instance macaques. As set forth above, the antibody construct of the invention exhibiting cross-species specificity described herein can be advantageously used in identical form in preclinical testing in non-chimpanzee primates and as drug in humans. The dosage regimen will be determined by the attending physician and clinical factors. As is well known in the medical arts, dosages for any one patient depend upon many factors, including the patient's size, body surface area, age, the particular compound to be administered, sex, time and route of administration, general health, and other drugs being administered concurrently.

[0312] The term “effective dose” or “effective dosage” is defined as an amount sufficient to achieve or at least partially achieve the desired effect. The term “therapeutically effective dose” is defined as an amount sufficient to cure or at least partially arrest the disease and its complications in a patient already suffering from the disease. Amounts or doses effective for this use will depend on the condition to be treated (the indication), the delivered antibody construct, the therapeutic context and objectives, the severity of the disease, prior therapy, the patient's clinical history and response to the therapeutic agent, the route of administration, the size (body weight, body surface or organ size) and/or condition (the age and general health) of the patient, and the general state of the patient's own immune system. The proper dose can be adjusted according to the judgment of the attending physician such that it can be administered to the patient once or over a series of administrations, and in order to obtain the optimal therapeutic effect.

[0313] A typical dosage may range from about 0.1 μg/kg to up to about 30 mg/kg or more, depending on the factors mentioned above. In specific embodiments, the dosage may range from 1.0 μg/kg up to about 20 mg/kg, optionally from 10 μg/kg up to about 10 mg/kg or from 100 μg/kg up to about 5 mg/kg.

[0314] A therapeutic effective amount of an antibody construct of the invention preferably results in a decrease in severity of disease symptoms, an increase in frequency or duration of disease symptom-free periods or a prevention of impairment or disability due to the disease affliction. For treating diseases correlating with PSMA expression as described herein above, a therapeutically effective amount of the antibody construct of the invention, here: an anti-PSMA/anti-CD3 antibody construct, preferably inhibits cell growth or tumor growth by at least about 20%, at least about 40%, at least about 50%, at least about 60%, at least about 70%, at least about 80%, or at least about 90% relative to untreated patients. The ability of a compound to inhibit tumor growth may be evaluated in an animal model predictive of efficacy

[0315] The pharmaceutical composition can be administered as a sole therapeutic or in combination with additional therapies such as anti-cancer therapies as needed, e.g. other proteinaceous and non-proteinaceous drugs. These drugs may be administered simultaneously with the composition comprising the antibody construct of the invention as defined herein or separately before or after administration of said antibody construct in timely defined intervals and doses.

[0316] The term “effective and non-toxic dose” as used herein refers to a tolerable dose of an inventive antibody construct which is high enough to cause depletion of pathologic cells, tumor elimination, tumor shrinkage or stabilization of disease without or essentially without major toxic effects. Such effective and non-toxic doses may be determined e.g. by dose escalation studies described in the art and should be below the dose inducing severe adverse side events (dose limiting toxicity, DLT).

[0317] The term “toxicity” as used herein refers to the toxic effects of a drug manifested in adverse events or severe adverse events. These side events may refer to a lack of tolerability of the drug in general and/or a lack of local tolerance after administration. Toxicity could also include teratogenic or carcinogenic effects caused by the drug.

[0318] The term “safety”, “in vivo safety” or “tolerability” as used herein defines the administration of a drug without inducing severe adverse events directly after administration (local tolerance) and during a longer period of application of the drug. “Safety”, “in vivo safety” or “tolerability” can be evaluated e.g. at regular intervals during the treatment and follow-up period. Measurements include clinical evaluation, e.g. organ manifestations, and screening of laboratory abnormalities. Clinical evaluation may be carried out and deviations to normal findings recorded/coded according to NCI-CTC and/or MedDRA standards. Organ manifestations may include criteria such as allergy/immunology, blood/bone marrow, cardiac arrhythmia, coagulation and the like, as set forth e.g. in the Common Terminology Criteria for adverse events v3.0 (CTCAE). Laboratory parameters which may be tested include for instance hematology, clinical chemistry, coagulation profile and urine analysis and examination of other body fluids such as serum, plasma, lymphoid or spinal fluid, liquor and the like. Safety can thus be assessed e.g. by physical examination, imaging techniques (i.e. ultrasound, x-ray, CT scans, Magnetic Resonance Imaging (MRI), other measures with technical devices (i.e. electrocardiogram), vital signs, by measuring laboratory parameters and recording adverse events. For example, adverse events in non-chimpanzee primates in the uses and methods according to the invention may be examined by histopathological and/or histochemical methods.

[0319] The above terms are also referred to e.g. in the Preclinical safety evaluation of biotechnology-derived pharmaceuticals S6; ICH Harmonised Tripartite Guideline; ICH Steering Committee meeting on Jul. 16, 1997.

[0320] Finally, the invention provides a kit comprising an antibody construct of the invention or produced according to the process of the invention, a pharmaceutical composition of the invention, a polynucleotide of the invention, a vector of the invention and/or a host cell of the invention.

[0321] In the context of the present invention, the term “kit” means two or more components—one of which corresponding to the antibody construct, the pharmaceutical composition, the vector or the host cell of the invention—packaged together in a container, recipient or otherwise. A kit can hence be described as a set of products and/or utensils that are sufficient to achieve a certain goal, which can be marketed as a single unit.

[0322] The kit may comprise one or more recipients (such as vials, ampoules, containers, syringes, bottles, bags) of any appropriate shape, size and material (preferably waterproof, e.g. plastic or glass) containing the antibody construct or the pharmaceutical composition of the present invention in an appropriate dosage for administration (see above). The kit may additionally contain directions for use (e.g. in the form of a leaflet or instruction manual), means for administering the antibody construct of the present invention such as a syringe, pump, infuser or the like, means for reconstituting the antibody construct of the invention and/or means for diluting the antibody construct of the invention.

[0323] The invention also provides kits for a single-dose administration unit. The kit of the invention may also contain a first recipient comprising a dried/lyophilized antibody construct and a second recipient comprising an aqueous formulation. In certain embodiments of this invention, kits containing single-chambered and multi-chambered pre-filled syringes (e.g., liquid syringes and lyosyringes) are provided.

[0324] It must be noted that as used herein, the singular forms “a”, “an”, and “the”, include plural references unless the context clearly indicates otherwise. Thus, for example, reference to “a reagent” includes one or more of such different reagents and reference to “the method” includes reference to equivalent steps and methods known to those of ordinary skill in the art that could be modified or substituted for the methods described herein.

[0325] Unless otherwise indicated, the term “at least” preceding a series of elements is to be understood to refer to every element in the series. Those skilled in the art will recognize, or be able to ascertain using no more than routine experimentation, many equivalents to the specific embodiments of the invention described herein. Such equivalents are intended to be encompassed by the present invention.

[0326] The term “and/or” wherever used herein includes the meaning of “and”, “or” and “all or any other combination of the elements connected by said term”.

[0327] The term “about” or “approximately” as used herein means within 20%, preferably within 10%, and more preferably within 5% of a given value or range. It includes, however, also the concrete number, e.g., about 20 includes 20.

[0328] The term “less than” or “greater than” includes the concrete number. For example, less than 20 means less than or equal to. Similarly, more than or greater than means more than or equal to, or greater than or equal to, respectively.

[0329] Throughout this specification and the claims which follow, unless the context requires otherwise, the word “comprise”, and variations such as “comprises” and “comprising”, will be understood to imply the inclusion of a stated integer or step or group of integers or steps but not the exclusion of any other integer or step or group of integer or step. When used herein the term “comprising” can be substituted with the term “containing” or “including” or sometimes when used herein with the term “having”.

[0330] When used herein “consisting of” excludes any element, step, or ingredient not specified in the claim element. When used herein, “consisting essentially of” does not exclude materials or steps that do not materially affect the basic and novel characteristics of the claim.

[0331] In each instance herein any of the terms “comprising”, “consisting essentially of” and “consisting of” may be replaced with either of the other two terms.

[0332] It should be understood that this invention is not limited to the particular methodology, protocols, material, reagents, and substances, etc., described herein and as such can vary. The terminology used herein is for the purpose of describing particular embodiments only, and is not intended to limit the scope of the present invention, which is defined solely by the claims.

[0333] All publications and patents cited throughout the text of this specification (including all patents, patent applications, scientific publications, manufacturer's specifications, instructions, etc.), whether supra or infra, are hereby incorporated by reference in their entirety. Nothing herein is to be construed as an admission that the invention is not entitled to antedate such disclosure by virtue of prior invention. To the extent the material incorporated by reference contradicts or is inconsistent with this specification, the specification will supersede any such material.

[0334] A better understanding of the present invention and of its advantages will be obtained from the following examples, offered for illustrative purposes only. The examples are not intended to limit the scope of the present invention in any way.

### Example 1: BiTE® Induced CD69 Expression on T Cells in Absence of Target Cells

[0335] Isolated PBMC from healthy human donors were cultured with increasing Target B/CD3 or Target A/CD3 HLE bispecific antibody constructs for 48 h. The expression of the activation marker CD69 on T cells was determined by immunostaining and flow cytometry and antigen specific conjugates mAb.

[0336] Target-independent T cell activation in terms of CD69 upregulation was observed for all anti-CDH 19 constructs but was most pronounced for heteroFc and crossbody molecules. Upregulation of CD69 by anti-Target B-scFc occurred at higher concentrations and the amplitude was in part lower compared to the other two Fc-based constructs.

[0337] For the anti-Target A almost no target-independent T cell activation was observed for the scFc-containing molecule, while the heteroFc construct induced a strong upregulation of CD69 on the cell surface T cells in the absence of target cells.

[0338] Target-independent T cell activation induced by BiTE® antibody constructs containing a single chain-Fc, or hetero-Fc fusion at the C-terminus was evaluated for the following constructs:

BiTE® antibody constructs (serial dilutions: 0.1 pM-2 μM)
[0339] a. Target A-I2C scFc; 1.14 mg/mL;
[0340] b. Target A Hetero Fc; 1.02 mg/
   Human PBMC effector cells (3 donors; #065, #823, #836 (scFc) #401, #415, #433 (heteroFc); #590, #595, 598, #605 (X-body)).

[0341] 48 h incubation time.

[0342] Determination of CD69 expression on CD4+ and CD8+ T cells with flow cytometer and antigen-specific conjugates mAb. Results see FIGS. 2A-2B.

[0343] Target-independent T cell activation induced by BiTE® antibody constructs containing a single chain-Fc, hetero-Fc or crossbody fusion at the C-terminus was evaluated for the following constructs:

BiTE® antibody constructs (serial dilutions: 0.1 pM-2 μM)
[0344] c. Target B×I2C-scFc; 245.3 μg/mL (
[0345] d. Target B Hetero Fc; 1 mg/mL
[0346] e. Target B crossbody; 6.3 mg/mL

[0347] Human PBMC effector cells (3 to 4 donors; #386, #392, #401 (scFc) #282, #284, #287 (heteroFc)). 48 h incubation time.

[0348] Determination of CD69 expression on CD4+ and CD8+ T cells with flow cytometer and antigen-specific conjugates mAb. Results see FIGS. 3A-3F.

[0349] Target-independent T cell activation in terms of CD69 upregulation was observed for several bispecific antibody constructs tested in these assays. The CD69 upregulation was in general more pronounced for the canonical BiTE® antibody constructs, heteroFc and crossbody antibody constructs when compared to the respective scFc antibody constructs. Upregulation of CD69 by the scFc constructs occurred in general at slightly higher concentrations and the amplitude was in part lower compared to the other two Fc-based constructs.

[0350] For the anti-Target B scFc antibody construct, no target-independent T cell activation was observed, while the heteroFc and X-Body antibody constructs induced a strong upregulation of CD69 on the cell surface of T cells in the absence of target cells. Hence, the scFc antibody construct according to the present invention shows an advantage as unspecific T cell activation, as exemplified here by CD69 upregulation, is not desired in specific immunotherapy.

### Materials and Methods

### Target B

[0351] Target-independent T cell activation induced by a BiTE® antibody constructs containing a single chain-Fc for the following construct:
[0352] 1. BiTE® antibody construct (serial dilutions: 1.3 pM-20 nM)
   [0353] 1. Target B-scFc
[0354] 2. Human PBMC effector cells (3 donors)
[0355] 3. 48 h incubation time
[0356] 4. Flow cytometric analysis of CD69 expression on CD4+ and CD8+ T cells using a PE-Cy7 conjugated mAb specific for CD69.

### Example 2

[0357] Purified BiTE® antibody constructs were coated on a Maxisorb Plate in decreasing concentration (100 nM, 1:4 dilutions). After 3× washing with PBS-T and blocking with PBS/3% (w/v) BSA (60 min, 37° C.), pooled human plasma was incubated for 60 min, 80 rpm at room temperature. After 3× washing a mouse monoclonal antibody specific for human C1q subunit A (CC1q) was added (Thermo MA1-83963, 1:500) for 60 min, 80 rpm, room temperature, after described washing steps a goat anti mouse Fc-POX mAb (1:5,000) was incubated for 60 min, 80 rpm, room temperature. After additional washing, TMB substrate was incubated and stopped after colorimetric reaction by addition of H₂SO₄. The absorption was determined at 450 nm.

[0358] Result: As shown in FIG. 4 at high concentrations, the BiTE® hetero Fc antibody construct (squares) showed higher binding signals for human CC1q compared to a BiTE® single chain Fc antibody construct (triangle). As a negative control a canonical BiTE® antibody construct (circle) was used, which showed no significant CC1q binding.

### Example 3: Pharmacokinetics of BiTE® Antibody Constructs Fused to Half-Life Extension Modalities

[0359] Two PSMA-targeting BiTE® antibody constructs were tested in the cynomolgus monkey in the context of pharmacokinetic (PK) studies. One BiTE® antibody construct was fused to a scFc half-life extending (HLE) moiety whereas the other one was used as single, non-half-life extended (non-HLO) “canonical” BiTE® antibody construct. The corresponding nomenclature of both molecules is briefly summarized in Error! Reference source not found.4 below.

TABLE 4
Compound nomenclature of two single dosed
BiTE ® antibody constructs

| compound | | |
|---|---|---|
| synonyme | test compound name | target |
| Compound 11a | PM 76-B10-scFc | PSMA |
| Compound 11b | MTR112-5 | |

[0360] The BiTE®-HLE antibody construct (compound 11a) was administered as short intravenous bolus injection, the canonical antibody construct as a continuous intravenous infusion (compound 11b). To compare pharmacokinetic parameters for both antibody constructs, only the terminal phase starting directly after end of infusion is shown for the canonical PSMA-BiTE® antibody construct. The BiTE® antibody constructs were administered in a dose-linear, pharmacokinetic relevant range of 15 μg/kg (compound 11a) and 15.4 μg/kg/day (compound 11b), respectively. For reasons of comparability the serum concentrations shown are dose-normalized and molecular weight-normalized (indicated in nmol).

[0361] For each of the above named compounds a group of two animals was used. Blood samples were collected and serum was prepared for determination of serum concentrations. Serum BiTE® antibody construct levels were measured using an immunoassay. This sandwich ELISA assay is performed by capturing via a specific BiTE® targeting antibody, while an antibody directed against the CD3-binding part of the construct was used for detection. The serum concentration-time profiles were used to determine PK parameters.

[0362] Blood sampling time points are listed for both study designs in Table 5 below.

TABLE 5
Blood sampling time points during PK studies.

| blood sampling time points: | blood sampling time points: |
|---|---|
| HLE antibody construct; | canonical antibody construct; |
| [h] after start of infusion | [h] after start of infusion |
| 0.085 | 167.76 |
| 0.25 | 168.96 |
| 0.5 | 172.08 |
| 1 | 175.92 |
| 4 | 180.00 |
| 8 | 192.00 |
| 24 | |
| 48 | |
| 72 | |
| 168 | |
| 240 | |
| 336 | |

[0363] The pharmacokinetics of the two BiTE® antibody constructs are shown exemplarily. Each compound group stands for the same BiTE® antibody construct either fused to a scFc half-life extending moiety or left as canonical molecule. For all proteins serum levels were quantifiable for all time points in all animals after BiTE®-HLE antibody construct administration. (FIG. 5 Error! Reference source not found.).

[0364] The pharmacokinetic parameters were determined using standard non-compartmental analysis (NCA) methods. Using non compartmental analysis, the following PK parameters were estimated: AUC_{inf} (Area under the serum concentration-time curve), Vss (volume of distribution at steady state), CL (systemic clearance) and terminal t_{1/2} (terminal half-life).

[0365] The PK parameter for each tested compound are summarized as mean of n=2 in Table 6 below.

TABLE 6
Pharmacokinetic parameter of two PSMA targeting BiTE ®
antibody constructs tested in cynomolgus monkeys.

| | terminal | AUC_{inf} | | |
|---|---|---|---|---|
| | t_{1/2} | [normalized to 15 μg/kg] | Cl | Vss |
| test item | [h] | [h * ng/mL] | [mL/h/kg] | [mL/kg] |
| Compound | 214 | 43014 | 0.4 | 98 |
| 11a | | | | |
| Compound | 6 | 7763 | 13.5 | 1132 |
| 11b | | | | |

[0366] Typically the PK profile for the canonical PSMA-BiTE® antibody constructs describes a very steeply declining serum concentration profile related to the clearance mechanism of these canonical proteins. The half-life extended PSMA-targeting BiTE®-scFc antibody construct shows a biphasic, exponential decline after single test item administrations in cynomolgus monkeys.

[0367] Overall, the PSMA-BiTE® antibody construct (Compound 11a) fused to a scFc HLE-modality shows a mean AUC_{inf} of 43014 h*ng/mL, a systemic clearance value of 0.4 mL/h/kg, as well as a corresponding volume of distribution of 98 mL/kg. Compound 11b, the canonical, i.e. non-half-life extended PSMA targeting BiTE® antibody construct shows a high clearance of 13.5 mL/h/kg leading to a low serum exposure of 7763 h*ng/mL.

[0368] The differences in pharmacokinetic behavior of the two different BiTE® antibody constructs tested exemplifies the general advantage of the half-life extended PSMA targeting BiTE®-scFc antibody construct over the corresponding canonical non-HLE version, especially in terms of residence time of the substance in the body.

### Example 4

[0369] Preformulated drug substances containing purified Target A-hALB, Target A-hFc, and Target A-scFc antibody constructs respectively were buffer exchanged via ultrafiltration/diafiltration using membranes with a molecular weight cut-off (MWCO) of 10 kDa. Final formulation was achieved by adding concentrated stock solutions. Resulting formulations for each construct are listed in Table 7 The target protein concentration was 1.0 mg/mL. Formulated Target A antibody constructs were filled to 1 mL in type I glass vials which were stoppered with butyl rubber stoppers and crimped with aluminum seals. Filled vials were incubated at −20, 5, 25 and 37° C. One vial of each version was subjected to five freeze and thaw (F/T) cycles. Target freezing temperature was −29° C. Target thawing temperature was 2° C. The ramp rate was approximately 0.3 K/min.

[0370] Visual particles were assessed in accordance to the method described by Ph Eur 2.9.20 by trained operators. Visual particle counts per vial are depicted in Table 7. The number of visual (larger than 125 μm) proteinaceous particles was higher for Target A-hFc if compared to both Target A-hALB and Target A-scFc.

TABLE 7
Number of visual proteinaceous particles per vial for stressed
and unstressed (T0) samples containing different half-life
extended anti-Target A BiTE ® antibody constructs.

| Construct | | | | |
|---|---|---|---|---|
| hALB | hFc | | scFc | |
| Formulation | | | | |
| K60RTrT | K60RTrT | G40MSuT | K60RTrT | G40MSuT |

Number of visible (>125 μm) proteinaceous particles per vial

| | | | | | |
|---|---|---|---|---|---|
| T0 | 0 | 0 | 1 | 0 | 0 |
| 5 F/T cycles | 0 | 2 | 2 | 0 | 1 |
| 2 w 5° C. | 0 | 2 | 2 | 0 | 0 |
| 2 w 25° C. | 0 | 2 | 1 | 0 | 0 |
| 2 w 37° C. | 0 | 2 | 2 | 0 | 0 |
| 4 w −20° C. | 0 | 2 | 1 | 0 | 0 |
| 4 w 5° C. | 0 | 1 | 2 | 0 | 0 |
| 4 w 25° C. | 0 | 2 | 2 | 0 | 0 |
| 4 w 37° C. | 0 | 2 | 2 | 0 | 0 |

[0371] The samples described above were also analyzed by size exclusion ultra-high performance chromatography (SE-UPLC) in order to quantify the percentaged content of high molecular weight species (HMWS). SE-UPLC was performed on an AcquityH-Class UPLC system (Waters) using an Acquity UPLC BEH200 SEC 150 mm column (Waters). Column temperature was set to 25° C. Separation of size variants was achieved by applying an isocratic method with a flow rate of 0.4 mL/min. The mobile phase was composed of 100 mM sodium phosphate, 250 mM NaCl at pH 6.8. The run time totals 6.0 minutes. Samples were held at 8° C. within the autosampler until analysis. A total amount of 3 μg protein was injected. In order to avoid carry over an intermediate injection with 40% acetonitrile was performed after each sample. Detection was based on fluorescence emission (excitation at 280 nm, emission at 325 nm). Peak integration was performed using Empower® software. Relative area under the curve of HMWS was reported (Table 8).

[0372] Fc-based antibody constructs exhibited lower HMWS contents in the formulation variant G40MSuT than in K60RTrT independent on the stress condition. It became evident that Target A-scFc contained less HMWS than Target A-hFc in both G40MSuT as well as K60RTrT preparations. Target A-scFc in its preferred formulation (G40MSuT) was less prone to HMWS formation than Target A-hALB formulated in K60RTrT. In previous experiments this buffer showed improved stabilizing potential for hALB based constructs.

TABLE 8
Overview on HMWS contents in stressed and unstressed (T0)
Target A-hALB, -hFc, and -scFc antibody construct preparations
determined via SE-UPLC

| Construct | | | | |
|---|---|---|---|---|
| hALB | hFc | | scFc | |
| Formulation | | | | |
| K60RTrT | K60RTrT | G40MSuT | K60RTrT | G40MSuT |

% HMWS

| | | | | | |
|---|---|---|---|---|---|
| T0 | 1.8 | 6.7 | 3.3 | 2.5 | 1.3 |
| 5 F/T cycles | 2.0 | 7.2 | 4.1 | 3.0 | 1.5 |
| 2 w 5° C. | n.t. | n.t. | n.t. | 2.9 | 1.1 |
| 2 w 25° C. | n.t. | 6.6 | 2.7 | 2.4 | 0.5 |
| 2 w 37° C. | 2.6 | 6.3 | 2.1 | 2.7 | 0.3 |
| 4 w −20° C. | 5.9 | 8.7 | 1.6 | 6.6 | 0.3 |
| 4 w 5° C. | 2.0 | 8.2 | 2.8 | 3.6 | 0.6 |
| 4 w 25° C. | 2.2 | 6.8 | 2.6 | 2.7 | 0.4 |
| 4 w 37° C. | 3.5 | 7.6 | 1.9 | 4.3 | 0.3 |

n.t. = not tested

[0373] The abundance of chemical modifications upon heat stress (incubation at 37° C.) was monitored by peptide mapping. Protein samples were enzymatically digested and the resulting peptides were separated using reversed phase chromatography. The column eluate was directly injected into the ion source of a mass spectrometer for identification and quantitation of the peptides.

[0374] In order to achieve maximum coverage, two separate enzyme digests were performed: once with trypsin and once with chymotrypsin. In each case, the proteins were denatured with guanidinum chloride and then reduced with dithiothreitol (DTT). After incubation in DTT, free cysteine residues were alkylated by the addition of iodoacetic acid. Samples were then buffer exchanged into 50 mM Tris pH 7.8 for digestion. Trypsin and chymotrypsin were added to separate reaction tubes at a ratio of 1:10 (sample:enzyme) each. Samples were digested for 30 min at 37° C. and the reaction was quenched by adding trifluoroacetic acid.

[0375] A load of 5 μg of each digest was separately injected onto a Zorbax SB-C18 (Agilent #859700-902) reversed phase column equilibrated in 0.1% (V/V) formic acid (FA). A 156 minutes gradient of up to 90% acetonitrile containing 0.1% FA was used to elute the peptides directly into the electrospray ion source of a Q-Exactive Plus mass spectrometer (Thermo Scientific). Data was collected in data dependent mode using a top 12 method in which a full scan (resolution 70 000; scan range 200-2000 m/z) was followed by high energy collision dissociation (HCD) of the 12 most abundant ions (resolution 17 500).

[0376] Peptides were identified based on accurate mass and tandem mass spectrum using in-house software. Identifications were manually verified. Relative quantities of modified and unmodified peptides were calculated based on ion abundance using Pinpoint software (Thermo Scientific).

[0377] Percentages of chemical modifications of the complement determining regions (CDRs) and of the half-life extending portion (either hALB or Fc) detected in Target A-hALB, -hFc, and -scFc antibody construct preparations are given by Table 9. When comparing similar formulation conditions, it became obvious that overall, chemical modifications were least abundant in scFc constructs.

TABLE 9
Overview on chemical modifications in stressed and
unstressed (T0) Target A-hALB, -hFc, and -scFc antibody
construct preparations determined via peptide mapping

| Construct | | | | |
|---|---|---|---|---|
| hALB | hFc | | scFc | |
| Formulation | | | | |
| K60RTrT | K60RTrT | G40MSuT | K60RTrT | G40MSuT |

% N101 deamidation (CDR)

| | | | | | |
|---|---|---|---|---|---|
| T0 | 0.1 | 0.2 | 0.2 | 0.2 | 0.2 |
| 2 w 37° C. | 0.7 | 0.8 | 3.0 | 0.7 | 3.2 |
| 4 w 37° C. | 1.3 | n.t. | 8.5 | n.t. | 6.4 |

% N162 deamidation (CDR)

| | | | | | |
|---|---|---|---|---|---|
| T0 | 3.0 | 1.7 | 1.9 | 2.3 | 2.5 |
| 2 w 37° C. | 15.9 | 11.6 | 2.7 | 15.0 | 3.3 |
| 4 w 37° C. | 26.8 | n.t. | 3.7 | n.t. | 4.1 |

% M279 oxidation (CDR)

| | | | | | |
|---|---|---|---|---|---|
| T0 | 0.6 | 1.4 | 1.6 | 0.6 | 1.0 |
| 2 w 37° C. | 1.2 | 0.8 | 0.8 | 0.6 | 1.0 |
| 4 w 37° C. | 0.9 | n.t. | 0.8 | n.t. | 0.6 |

% N348 deamidation (CDR)

| | | | | | |
|---|---|---|---|---|---|
| T0 | 0.5 | 3.2 | 3.3 | 0.5 | 0.9 |
| 2 w 37° C. | 20.5 | 21.6 | 1.9 | 9.4 | 1.3 |
| 4 w 37° C. | 22.8 | n.t. | 2.0 | n.t. | 2.9 |

% N351 deamidation (CDR)

| | | | | | |
|---|---|---|---|---|---|
| T0 | 0.2 | 2.9 | 2.6 | 0.5 | 1.0 |
| 2 w 37° C. | 6.6 | 12.7 | 0.9 | 3.8 | 0.4 |
| 4 w 37° C. | 8.7 | n.t. | 0.8 | n.t. | 0.8 |

% M530 oxidation (Fc)

| | | | | | |
|---|---|---|---|---|---|
| T0 | n.a. | 3.9 | 4.1 | 2.6 | 3.2 |
| 2 w 37° C. | n.a. | 9.0 | 3.1 | 4.0 | 4.3 |
| 4 w 37° C. | n.a. | n.t. | 3.4 | n.t. | 3.5 |

% N603 deamidation (Fc)

| | | | | | |
|---|---|---|---|---|---|
| T0 | n.a. | 1.3 | 1.9 | 1.3 | 1.4 |
| 2 w 37° C. | n.a. | 7.9 | 4.6 | 7.0 | 5.6 |
| 4 w 37° C. | n.a. | n.t. | 6.9 | n.t. | 8.1 |

% M706 oxidation (Fc)

| | | | | | |
|---|---|---|---|---|---|
| T0 | n.a. | 3.2 | 3.6 | 1.5 | 2.1 |
| 2 w 37° C. | n.a. | 6.0 | 2.8 | 2.1 | 2.5 |
| 4 w 37° C. | n.a. | n.t. | 2.6 | n.t. | 2.0 |

% M587 oxidation (hALB)

| | | | | | |
|---|---|---|---|---|---|
| T0 | 1.0 | n.a. | n.a. | n.a. | n.a. |
| 2 w 37° C. | 2.2 | n.a. | n.a. | n.a. | n.a. |
| 4 w 37° C. | 2.3 | n.a. | n.a. | n.a. | n.a. |

% M623 oxidation (hALB)

| | | | | | |
|---|---|---|---|---|---|
| T0 | 1.9 | n.a. | n.a. | n.a. | n.a. |
| 2 w 37° C. | 2.4 | n.a. | n.a. | n.a. | n.a. |
| 4 w 37° C. | 3.0 | n.a. | n.a. | n.a. | n.a. |

% M798 oxidation (hALB)

| | | | | | |
|---|---|---|---|---|---|
| T0 | 1.4 | n.a. | n.a. | n.a. | n.a. |
| 2 w 37° C. | 3.3 | n.a. | n.a. | n.a. | n.a. |
| 4 w 37° C. | 3.5 | n.a. | n.a. | n.a. | n.a. |

% M829 oxidation (hALB)

| | | | | | |
|---|---|---|---|---|---|
| T0 | 8.9 | n.a. | n.a. | n.a. | n.a. |
| 2 w 37° C. | 42.9 | n.a. | n.a. | n.a. | n.a. |
| 4 w 37° C. | 44.1 | n.a. | n.a. | n.a. | n.a. |

n.a. = not applicable;
n.t. = not tested

### Example 5

[0378] Target A-hALB, -hFc, -scFc antibody construct formulated as described under Example 4 were subjected to a pH jump experiment. The concentration of the starting materials was 1.0 mg/mL. A volume of 0.38 mL of each starting material was filled in a glass vial. After preconditioning at 37° C. the solutions were spiked with 20 fold phosphate buffered saline (PBS) which was composed of 0.090 M potassium phosphate, 0.480 M sodium phosphate (both dibasic), 0.052 M potassium chloride and 2.76 M NaCl. The spiked samples were incubated at 37° C. for two weeks. After incubation they were analyzed by SE-UPLC using the method described under Example 4 and the percentaged content of HMWS was reported (Table 10). When comparing all constructs formulated in K60RTrT the HMWS content increased in the following order: hALB<scFc<hFc. Target A-scFc also showed a lower HMWS content than Target A-hFc when formulated in G40MSuT.

TABLE 10
Overview on HMWS contents in stressed (pH jump + 2 w 37° C.)
Target A-hALB, -hFc, and -scFc antibody construct preparations
determined via SE-UPLC

| Construct | | | | |
|---|---|---|---|---|
| hALB | hFc | | scFc | |
| Formulation | | | | |
| K60RTrT | K60RTrT | G40MSuT | K60RTrT | G40MSuT |

% HMWS

| | | | | | |
|---|---|---|---|---|---|
| 2 w 37° C. | 1.5 | 8.3 | 7.1 | 5.4 | 5.1 |

### Example 6

[0379] Target A-hALB, -hFc, and -scFc antibody construct formulated as described under Example 4 were subjected to agitation stress. The concentration of the starting materials was 1.0 mg/mL. A volume of 0.5 mL of each solution was filtered through an appropriate 0.22 μm filter and filled into 3 cc glass vials. The vials were placed in a plastic box ensuring that the vials were not displaced within the box during agitation. The box was placed onto an orbital shaker. The samples were agitated at 500 rpm for 65 hours. Visual particles were assessed in accordance to the method described by Ph Eur 2.9.20. The method was conducted by trained operators. Visual particle counts per vial are depicted in Table 11. Visible proteinaceous particles were only observed in Target A-hFc preparations.

TABLE 11
Number of visual proteinaceous particles
per vial in agitated samples

| Construct | | | | |
|---|---|---|---|---|
| hALB | hFc | | scFc | |
| Formulation | | | | |
| K60RTrT | K60RTrT | G40MSuT | K60RTrT | G40MSuT |

Number of visible (>125 μm) proteinaceous particles per vial

| | | | | | |
|---|---|---|---|---|---|
| 65 h, | 0 | 1 | 1 | 0 | 0 |
| 500 rpm | | | | | |

[0380] Above samples were also analyzed by size exclusion ultra-high performance chromatography (SE-UPLC) in order to quantify the percentaged content of high molecular weight species (HMWS). The same method as described in Example 4 was applied. The HMWS contents of agitated samples are outlined by Table 12. The formation of HMWS was most pronounced in Target A-hFc antibody construct when comparing K60RTrT preparations. HMWS were more abundant in Target A-hFc than in Target A-scFc.

TABLE 12
Overview on HMWS contents in stressed (pH jump +
2 w 37° C.) Target A-hALB, -hFc, and -scFc preparations
determined via SE-UPLC

| Construct | | | | |
|---|---|---|---|---|
| hALB | hFc | | scFc | |
| Formulation | | | | |
| K60RTrT | K60RTrT | G40MSuT | K60RTrT | G40MSuT |

% HMWS

| | | | | | |
|---|---|---|---|---|---|
| 65 h, | 1.8 | 5.8 | 2.4 | 1.8 | 0.3 |
| 500 rpm | | | | | |

### Example 7

[0381] Target A-hALB, -hFc, and -scFc antibody construct formulated as described under Example 4 were exposed to visible and UVA light (photo stress). Protein concentration totaled 1 mg/mL in all preparations. Protein solutions were filtered through a filter with 0.22 μm pore size and filled to 0.5 mL in type I glass vials. Target A-hALB and -scFc were subjected to two different tests including 0.2 MLux visible light/25 W*h/m² UVA light and 1.2 MLux visible light/173 W*h/m² respectively. Target A-hFc was subjected to two different tests including 0.2 MLux visible light without UVA light and 1.2 MLux visible light/30 W*h/m² UVA light respectively. Chamber temperatures were adjusted to 25° C. After light exposure samples were analyzed by visible inspection (Table 13), SE-UPLC (Table 14) and peptide map (Table 15). Aforementioned methods were performed according to the procedures described under Example 4. Although Target A-hALB, and -scFc antibody construct were exposed to higher doses of UVA light, no visible proteinaceous particles was observed whereas Target A-hFc antibody construct samples exhibited one visible proteinaceous particle per vial for both tests irrespective of the formulation.

TABLE 13
Overview on the number of visible proteinaceous particles
per vial in Target A-hALB, -hFc, and -scFc antibody construct
preparations determined after light exposure

| Construct | | | | |
|---|---|---|---|---|
| hALB | hFc | | scFc | |
| Formulation | | | | |
| K60RTrT | K60RTrT | G40MSuT | K60RTrT | G40MSuT |

Number of visible (>125 μm) proteinaceous particles per vial

| | | | | | |
|---|---|---|---|---|---|
| T0 | 0 | 0 | 1 | 0 | 0 |
| Test 1 | 0¹⁾ | 1²⁾ | 1²⁾ | 0¹⁾ | 0¹⁾ |
| Test 2 | 0³⁾ | 1⁴⁾ | 1⁴⁾ | 0³⁾ | 0³⁾ |

¹⁾0.2 MLux visible light/25 W*h/m² UVA light,
²⁾0.2 MLux visible light without UVA light,
³⁾1.2 MLux visible light/173 W*h/m²,
⁴⁾1.2 MLux visible light/30 W*h/m²

[0382] HMWS increased in the following order Target A-hALB<-scFc<-hFc antibody construct when the protein was formulated in K60RTrT. HMWS could be reduced for Fc based constructs when formulated in G40MSuT. However HMWS were again less pronounced for Target A-scFc. Target A-hFc antibody construct revealed to be especially sensitive towards UVA light exposure.

TABLE 14
Overview on HMWS contents in Target A-hALB, -hFc,
and -scFc antibody construct preparations determined
after light exposure via SE-UPLC

| Construct | | | | |
|---|---|---|---|---|
| hALB | hFc | | scFc | |
| Formulation | | | | |
| K60RTrT | K60RTrT | G40MSuT | K60RTrT | G40MSuT |

% HMWS

| | | | | | |
|---|---|---|---|---|---|
| T0 | 1.8 | 6.7 | 3.3 | 2.5 | 1.3 |
| Test 1 | 1.8¹⁾ | 6.3²⁾ | 2.5²⁾ | 2.1¹⁾ | 0.4¹⁾ |
| Test 2 | 2.0³⁾ | 11.0⁴⁾ | 2.1⁴⁾ | 2.4³⁾ | 0.3³⁾ |

¹⁾0.2 MLux visible light/25 W*h/m² UVA light,
²⁾0.2 MLux visible light without UVA light,
³⁾1.2 MLux visible light/173 W*h/m²,
⁴⁾1.2 MLux visible light/30 W*h/m²

[0383] Percentages of chemical modifications of the complement determining regions (CDRs) and of the half-life extending portion (either hALB or Fc) detected in Target A-hALB, -hFc, and -scFc antibody construct preparations are given by Table 15. When comparing similar formulation conditions, it became obvious that overall, chemical modifications were least abundant in scFc constructs.

TABLE 15
Overview on chemical modifications in Target A-hALB, -hFc,
and -scFc antibody construct preparations determined
after light exposure via peptide mapping

| Construct | | | | |
|---|---|---|---|---|
| hALB | hFc | | scFc | |
| Formulation | | | | |
| K60RTrT | K60RTrT | G40MSuT | K60RTrT | G40MSuT |

% N101 deamidation (CDR)

| | | | | | |
|---|---|---|---|---|---|
| T0 | 0.1 | 0.2 | 0.2 | 0.2 | 0.2 |
| Test 1 | 0.2¹⁾ | n.t. | 0.3²⁾ | n.t. | 0.5¹⁾ |
| Test 2 | 0.2³⁾ | n.t. | 0.6⁴⁾ | n.t. | 0.7³⁾ |

% N162 deamidation (CDR)

| | | | | | |
|---|---|---|---|---|---|
| T0 | 3.0 | 1.7 | 1.9 | 2.3 | 2.5 |
| Test 1 | 3.0¹⁾ | n.t. | 2.1²⁾ | n.t. | 2.7¹⁾ |
| Test 2 | 3.6³⁾ | n.t. | 3.1⁴⁾ | n.t. | 2.8³⁾ |

% M279 oxidation (CDR)

| | | | | | |
|---|---|---|---|---|---|
| T0 | 0.6 | 1.4 | 1.6 | 0.6 | 1.0 |
| Test 1 | 0.8¹⁾ | n.t. | 2.6²⁾ | n.t. | 0.6¹⁾ |
| Test 2 | 1.0³⁾ | n.t. | 6.3⁴⁾ | n.t. | 0.7³⁾ |

% N348 deamidation (CDR)

| | | | | | |
|---|---|---|---|---|---|
| T0 | 0.5 | 3.2 | 3.3 | 0.5 | 0.9 |
| Test 1 | 0.4¹⁾ | n.t. | 2.7²⁾ | n.t. | 0.2¹⁾ |
| Test 2 | 0.9³⁾ | n.t. | 3.9⁴⁾ | n.t. | 0.2³⁾ |

% N351 deamidation (CDR)

| | | | | | |
|---|---|---|---|---|---|
| T0 | 0.2 | 2.9 | 2.6 | 0.5 | 1.0 |
| Test 1 | 0.4¹⁾ | n.t. | 2.0²⁾ | n.t. | 0.3¹⁾ |
| Test 2 | 0.5³⁾ | n.t. | 2.6⁴⁾ | n.t. | 0.3³⁾ |

% M530 oxidation (Fc)

| | | | | | |
|---|---|---|---|---|---|
| T0 | n.a. | 3.9 | 4.1 | 2.6 | 3.2 |
| Test 1 | n.a. | n.t. | 7.6²⁾ | n.t. | 3.1¹⁾ |
| Test 2 | n.a. | n.t. | 21.8⁴⁾ | n.t. | 4.1³⁾ |

% M706 oxidation (Fc)

| | | | | | |
|---|---|---|---|---|---|
| T0 | n.a. | 3.2 | 3.6 | 1.5 | 2.1 |
| Test 1 | n.a. | n.t. | 6.5²⁾ | n.t. | 1.8¹⁾ |
| Test 2 | n.a. | n.t. | 17.8⁴⁾ | n.t. | 2.7³⁾ |

% M587 oxidation (hALB)

| | | | | | |
|---|---|---|---|---|---|
| T0 | 1.0 | n.a. | n.a. | n.a. | n.a. |
| Test 1 | 1.5 | n.a. | n.a. | n.a. | n.a. |
| Test 2 | 2.4 | n.a. | n.a. | n.a. | n.a. |

% M623 oxidation (hALB)

| | | | | | |
|---|---|---|---|---|---|
| T0 | 1.9 | n.a. | n.a. | n.a. | n.a. |
| Test 1 | 4.0 | n.a. | n.a. | n.a. | n.a. |
| Test 2 | 4.1 | n.a. | n.a. | n.a. | n.a. |

% M798 oxidation (hALB)

| | | | | | |
|---|---|---|---|---|---|
| T0 | 1.4 | n.a. | n.a. | n.a. | n.a. |
| Test 1 | 2.1 | n.a. | n.a. | n.a. | n.a. |
| Test 2 | 3.1 | n.a. | n.a. | n.a. | n.a. |

% M829 oxidation (hALB)

| | | | | | |
|---|---|---|---|---|---|
| T0 | 8.9 | n.a. | n.a. | n.a. | n.a. |
| Test 1 | 31.0 | n.a. | n.a. | n.a. | n.a. |
| Test 2 | 25.2 | n.a. | n.a. | n.a. | n.a. |

n.a. = not applicable;
n.t. = not tested

### Example 8

[0384] Target A-hALB antibody construct was formulated in K60RTrT and Target A-scFc antibody construct was formulated in G40MSuT according to the procedure described in Example 4. Protein concentrations totaled 0.05 mg/mL. Glass (borosilicate, type 1, 13 mm 3 cc vial from West, Art. No. 68000375) and polypropylene test containers (2 mL with O-ring, e.g. from Sarstedt, Art No. 72.694.005) are filled with 500 μL of the test solution. The test solution was left for five minutes in the first test container. Then a 150 μL aliquot was sampled for analysis. The remaining test solution (350 μL) was transferred sequentially from one test container to the next (five containers in total). In each vial, the solution was left for five minutes before the next transfer. The same pipette tip was used for each transfer step. The same test was performed using 30 mL polycarbonate bottles (Nalgene, PCS-000295 with closure, PP/20-415/ZTPE). For this container type the first container was filled with 5 mL. After a 150 μL aliquot was sampled, the residual volume was transferred from one test container to the next (according to the procedure described above). Samples pulled from container #1 and #5 were analyzed by SE-UPLC (method as described under Example 4). In addition protein detection was carried out with a PDA detector (280 nm) in order to determine protein concentrations. Percentaged protein recovery from each test container is given by Table 16. It was shown that protein recovery was more pronounced for Target A-scFc antibody construct than for Target A-hALB antibody construct irrespective of the container type.

TABLE 16
Protein recovery from different container types for Target A-hALB,
and -scFc antibody construct determined by SE-UPLC

Construct

| | |
|---|---|
| hALB | scFc |

Formulation

| | |
|---|---|
| K60RTrT | G40MSuT |

% Protein recovery (from nominal)

| | | |
|---|---|---|
| Type I glass | 80.0 | 92.0 |
| Polypropylene | 87.0 | 97.3 |
| Polycarbonate | 87.0 | 96.0 |

### Example 9

[0385] Target A-hALB antibody construct was formulated in K60RTrT and Target A-scFc antibody construct was formulated in K60RTrT and G40MSuT according to the procedure described in Example 4. The protein concentration totaled 1.0 mg/mL. 1950 μL of each test solution was spiked with 50 μL of a 1000 ppm silicon standard solution (Specpure from AlfaAesar, Art. No. 38717) resulting in a 25 ppm spike. An unspiked test solution served as control sample. The spiked test solution as well as the control sample were filled into 3 cc type I glass vials and were incubated at 37° C. for 24 hours. All samples were analyzed by SE-UPLC according to the method described in Example 4 in order to quantify the amount of HMWS (Table 17).

TABLE 17
Overview on HMWS contents in Target A-hALB, and -scFc preparations
determined via SE-UPLC after spiking with 25 ppm silicon

| Construct | |
|---|---|
| hALB | scFc |

| Formulation | | |
|---|---|---|
| K60RTrT | K60RTrT | G40MSuT |

Δ % HMWS (compared to unspiked control)

| | | | |
|---|---|---|---|
| 25 ppm spike | 1.0 | 1.0 | 0.2 |

### Example 10

[0386] Preformulated drug substances containing purified Target C (cc)-hALB, Target C (cc)-hFc, and Target C (cc)-scFc antibody constructs respectively were buffer exchanged via ultrafiltration/diafiltration using membranes with a molecular weight cut-off (MWCO) of 10 kDa. Final formulation was achieved by adding concentrated stock solutions. Resulting formulations for each construct are listed in Table 18. The target protein concentration was 1.0 mg/mL. Formulated Target C (cc)-constructs were filled to 1 mL in type I glass vials which were stoppered with butyl rubber stoppers and crimped with aluminum seals. Filled vials were incubated at −20, 5, 25 and 37° C. One vial of each version was subjected to five freeze and thaw (F/T) cycles. Target freezing temperature was −29° C. Target thawing temperature was 2° C. The ramp rate was approximately 0.3 K/min. The samples described above were also analyzed by size exclusion ultra-high performance chromatography (SE-UPLC) in order to quantify the percentage content of high molecular weight species (HMWS). SE-UPLC was performed according to the method described under Example 4. When formulated in K60RTrT, HMWS increased in the following order in unstressed samples: scFc<hALB<hFc. The least pronounced increase in HMWS upon freeze thaw stress was observed for the scFc-construct. The hFc-antibody construct revealed to be most prone to HMWS formation at −20° C. HMWS contents increased after four weeks storage at 5° C. The HMWS formation under these conditions was more pronounced for Fc based constructs than for albumin based constructs. In K60RTrT no significant increases in HMWS were observed at elevated storage temperatures (25 and 37° C.). When formulated in G40MSuT, all constructs revealed similar HMWS contents in unstressed samples. The increase during freeze thaw was more distinct for Fc based constructs if compared to the albumin based construct. In G40MSuT, the hFc-construct was least stable during storage at −20° C. Considerable increases in HMWS during liquid storage were only observed for the hALB-construct.

TABLE 18
Overview on HMWS contents in stressed and unstressed (T0) Target C (cc)-
hALB, -hFc, and -scFc antibody construct preparations determined via SE-UPLC

| Construct | | | | | |
|---|---|---|---|---|---|
| hALB | | hFc | | scFc | |
| Formulation | | | | | |
| K60RTrT | G40MSuT | K60RTrT | G40MSuT | K60RTrT | G40MSuT |

% HMWS

| | | | | | | |
|---|---|---|---|---|---|---|
| T0 | 1.5 | 0.3 | 2.7 | 0.3 | 1.3 | 0.3 |
| 5 F/T cycles | 2.0 | 0.5 | 3.1 | 0.7 | 1.6 | 0.7 |
| 2 w −20° C. | n.t | n.t | n.t | n.t | 1.5 | 0.5 |
| 2 w 5° C. | n.t | n.t | n.t | n.t | 1.8 | 0.2 |
| 2 w 25° C. | 1.7 | 0.6 | 2.3 | 0.2 | 1.3 | 0.2 |
| 2 w 37° C. | 1.9 | 0.7 | 1.8 | 0.2 | 1.2 | 0.2 |
| 4 w −20° C. | 1.6 | 0.4 | 4.2 | 1.5 | 1.7 | 0.9 |
| 4 w 5° C. | 1.9 | 0.3 | 3.3 | 0.3 | 2.1 | 0.4 |
| 4 w 25° C. | 1.4 | 0.6 | 2.2 | 0.2 | 1.4 | 0.4 |
| 4 w 37° C. | 1.3 | 0.7 | 2.0 | 0.1 | 1.4 | 0.3 |

n.t. = not tested

[0387] The abundance of chemical modifications upon heat stress (incubation at 37° C.) was monitored by peptide mapping according to the method described in Example 4. Percentages of chemical modifications of the complement determining regions (CDRs) detected in Target C (cc)-hALB, -hFc, and -scFc preparations are given by Table 19. Overall, Target C (cc)-scFc exhibited the lowest amount of chemical modifications in the CDRs. It became evident that especially deamidations of the CDRs were least pronounced for the scFc construct.

TABLE 19
Overview on chemical modifications in stressed and unstressed (T0)
Target C (cc)-hALB, -hFc, and -scFc antibody construct preparations determined via
peptide mapping

| Construct | | | | | |
|---|---|---|---|---|---|
| hALB | | hFc | | scFc | |
| Formulation | | | | | |
| K60RTrT | G40MSuT | K60RTrT | G40MSuT | K60RTrT | G40MSuT |

% M34 oxidation (CDR)

| | | | | | | |
|---|---|---|---|---|---|---|
| T0 | 1.0 | 1.8 | 1.0 | 1.4 | 1.7 | 1.9 |
| 2 w 37° C. | 0.9 | 1.3 | 0.9 | 1.1 | 1.0 | 1.7 |
| 4 w 37° C. | n.t. | n.t. | n.t. | 1.6 | n.t. | 1.8 |

% D103 isomerization (CDR)

| | | | | | | |
|---|---|---|---|---|---|---|
| T0 | 0.8 | 0.8 | 0.8 | 0.8 | 0.6 | 0.6 |
| 2 w 37° C. | 4.0 | 4.6 | 4.5 | 4.4 | 5.8 | 7.3 |
| 4 w 37° C. | n.t. | n.t. | n.t. | 8.0 | n.t. | 12.4 |

% M290 oxidation (CDR)

| | | | | | | |
|---|---|---|---|---|---|---|
| T0 | 0.7 | 1.4 | 0.8 | 1 | 1.3 | 1.4 |
| 2 w 37° C. | 0.7 | 1.0 | 0.8 | 0.8 | 0.8 | 1.3 |
| 4 w 37° C. | n.t. | n.t. | n.t. | 1.2 | n.t. | 1.6 |

% N359 deamidation (CDR)

| | | | | | | |
|---|---|---|---|---|---|---|
| T0 | 5.8 | 11.4 | 5.3 | 6.3 | 0.4 | 0.5 |
| 2 w 37° C. | 19.3 | 5.8 | 11.2 | 2.8 | 7.0 | 0.9 |
| 4 w 37° C. | n.t. | n.t. | n.t. | 2.9 | n.t. | 2.2 |

% N362 deamidation (CDR)

| | | | | | | |
|---|---|---|---|---|---|---|
| T0 | 5.4 | 8.7 | 3.9 | 4.0 | 0.2 | 0.3 |
| 2 w 37° C. | 13.5 | 3.6 | 6.7 | 1.2 | 3.1 | 0.3 |
| 4 w 37° C. | n.t. | n.t. | n.t. | 1.4 | n.t. | 0.7 |

n.a. = not applicable;
n.t. = not tested

### Example 11

[0388] Target C (cc)-hALB, -hFc, and -scFC antibody constructs formulated as described under Example 4 were subjected to a pH jump experiment. The concentration of the starting materials was 1.0 mg/mL. A volume of 0.38 mL of each starting material was filled in a glass vial. After preconditioning at 37° C. the solutions were spiked with 20 fold phosphate buffered saline (PBS) which was composed of 0.090 M potassium phosphate, 0.480 M sodium phosphate (both dibasic), 0.052 M potassium chloride and 2.76 M NaCl. The spiked samples were incubated at 37° C. for two weeks. After incubation they were analyzed by SE-UPLC using the method described under Example 4 and the percentaged content of HMWS was reported (Table 20). Target C (cc)-scFc constructs showed the lowest HMWS content after pH jump if compared to Target C (cc)-hALB and -hFc irrespective of the formulation.

TABLE 20
Overview on HMWS contents in stressed (pH jump + 2 w 37° C.) Target C (cc)-
hALB, -hFc, and -scFc antibody construct preparations determined via SE-UPLC

| Construct | | | | | |
|---|---|---|---|---|---|
| hALB | | hFc | | scFc | |
| Formulation | | | | | |
| K60RTrT | G40MSuT | K60RTrT | G40MSuT | K60RTrT | G40MSuT |

% HMWS

| | | | | | | |
|---|---|---|---|---|---|---|
| 2 w 37° C. | 1.7 | 4.8 | 1.6 | 1.8 | 1.1 | 1.5 |

### Example 12

[0389] Target C (cc)-hALB, -hFc, and -scFc antibody constructs formulated as described under Example 10 were subjected to agitation stress. The concentration of the starting materials was 1.0 mg/mL. A volume of 0.5 mL of each solution was filter through an appropriate 0.22 μm filter and filled into 3 cc type I glass vials. The vials were placed in a plastic box ensuring that the vials were not displaced within the box during agitation. The box was placed onto an orbital shaker. The samples were agitated at 500 rpm for 65 hours. Samples were analyzed by SE-UPLC in order to quantify the percentaged content of high molecular weight species (HMWS). The same method as described in Example 4 was applied. The HMWS contents of agitated samples are outlined by Table 21. The formation of HMWS was least pronounced for Target C (cc)-scFc in either formulation.

TABLE 21
Overview on HMWS contents in stressed (pH jump + 2 w 37° C.) Target C (cc)-
hALB, -hFc, and -scFc antibody construct preparations determined via SE-UPLC

| Construct | | | | | |
|---|---|---|---|---|---|
| hALB | | hFc | | scFc | |
| Formulation | | | | | |
| K60RTrT | G40MSuT | K60RTrT | G40MSuT | K60RTrT | G40MSuT |

% HMWS

| | | | | | | |
|---|---|---|---|---|---|---|
| 65 h, 500 rpm | 2.1 | 0.8 | 2.3 | 0.4 | 1.3 | 0.2 |

### Example 13

[0390] Target C (cc)-hALB, -hFc, and -scFc antibody constructs formulated as described under Example 4 were exposed to visible and UVA light (photo stress). Protein concentration totaled 1 mg/mL in all preparations. Protein solutions were filtered through a filter with 0.22 μm pore size and filled to 0.5 mL in type I glass vials. Target C (cc)-hALB and -scFc were subjected to two different tests including 0.2 MLux visible light/25 W*h/m² UVA light and 1.2 MLux visible light/173 W*h/m² respectively. Target C (cc)-hFc was subjected to two different tests including 0.2 MLux visible light without UVA light and 1.2 MLux visible light/30 W*h/m² UVA light respectively. Chamber temperatures were adjusted to 25° C. After light exposure samples were analyzed by SE-UPLC (Table 22) and peptide map (Table 23). Aforementioned methods were performed according to the procedures under Example 4. Despite of the higher UVA light intensity applied to Target C (cc)-scFc, this construct was stable against HMWS formation. In contrast, Target C (cc)-hFc and Target C (cc)-hALB showed an increase in HMWS upon test 2 conditions.

TABLE 22
Overview on HMWS contents in Target C (cc)-hALB, -hFc, and -scFc
antibody construct preparations determined after light exposure via SE-UPLC

| Construct | | | | | |
|---|---|---|---|---|---|
| hALB | | hFc | | scFc | |
| Formulation | | | | | |
| K60RTrT | G40MSuT | K60RTrT | G40MSuT | K60RTrT | G40MSuT |

% HMWS

| | | | | | | |
|---|---|---|---|---|---|---|
| T0 | 1.5 | 0.3 | 2.7 | 0.3 | 1.3 | 0.3 |
| Test 1 | 1.8¹ | 0.3¹ | 2.5² | 0.3² | 1.4¹ | 0.3¹⁾ |
| Test 2 | 4.6³⁾ | 1.1³⁾ | 6.0⁴⁾ | 0.7⁴⁾ | 1.5³⁾ | 0.3³⁾ |

¹⁾0.2 MLux visible light/25 W * h/m² UVA light,
²⁾0.2 MLux visible light without UVA light,
³⁾1.2 MLux visible light/173 W * h/m²,
⁴⁾1.2 MLux visible light/30 W * h/m²

[0391] Overall chemical modifications upon light exposure were least pronounced for Target C (cc)-scFc. Especially deamidations of the CDRs were formed to a higher extent in Target C (cc)-hALB and Target C (cc)-hFc. When comparing Fc based constructs it was revealed that Target C (cc)-scFc was less prone to chemical modifications of the Fc portion although the scFc construct was exposed to higher UVA light doses than the hFc-construct. Table 23 also lists the most abundant chemical modifications of the albumin portion in Target C (cc)-hALB demonstrating that the half-life extending portion of this construct was chemically more degraded than the Fc portions of Target C (cc)-hFc and -scFc antibody construct.

TABLE 23
Overview on chemical modifications in Target C (cc)-hALB, -hFc, and -scFc
antibody construct preparations determined after light exposure via peptide mapping

| Construct | | | | | |
|---|---|---|---|---|---|
| hALB | | hFc | | scFc | |
| Formulation | | | | | |
| K60RTrT | G40MSuT | K60RTrT | G40MSuT | K60RTrT | G40MSuT |

% M34 oxidation (CDR)

| | | | | | | |
|---|---|---|---|---|---|---|
| T0 | 1.0 | 1.8 | 1.0 | 1.4 | 1.7 | 1.9 |
| Test 1 | 1.5¹⁾ | n.t. | 0.7²⁾ | 4.2²⁾ | 1.4¹⁾ | 1.2¹⁾ |
| Test 2 | 1.7³⁾ | n.t. | 1.1⁴⁾ | 4.2⁴⁾ | 1.3³⁾ | 1.7³⁾ |

% D103 isomerization (CDR)

| | | | | | | |
|---|---|---|---|---|---|---|
| T0 | 0.8 | 0.8 | 0.8 | 0.8 | 0.6 | 0.6 |
| Test 1 | 0.8¹⁾ | n.t. | 0.9²⁾ | 0.9²⁾ | 0.8¹⁾ | 1.0¹⁾ |
| Test 2 | 1.1³⁾ | n.t. | 1.2⁴⁾ | 1.4⁴⁾ | 1.0³⁾ | 1.3³⁾ |

% M290 oxidation (CDR)

| | | | | | | |
|---|---|---|---|---|---|---|
| T0 | 0.7 | 1.4 | 0.8 | 1 | 1.3 | 1.4 |
| Test 1 | 1.1¹⁾ | n.t. | 0.5²⁾ | 3.3²⁾ | 1.0¹⁾ | 0.9¹⁾ |
| Test 2 | 1.4³⁾ | n.t. | 1.1⁴⁾ | 4.2⁴⁾ | 1.0³⁾ | 1.4³⁾ |

% N359 deamidation (CDR)

| | | | | | | |
|---|---|---|---|---|---|---|
| T0 | 5.8 | 11.4 | 5.3 | 6.3 | 0.4 | 0.5 |
| Test 1 | 10.8¹⁾ | n.t. | 4.5²⁾ | 5.6²⁾ | 0.4¹⁾ | 0.2¹⁾ |
| Test 2 | 12.4³⁾ | n.t. | 10.3⁴⁾ | 3.6⁴⁾ | 0.6³⁾ | 0.2³⁾ |

% N362 deamidation (CDR)

| | | | | | | |
|---|---|---|---|---|---|---|
| T0 | 5.4 | 8.7 | 3.9 | 4.0 | 0.2 | 0.3 |
| Test 1 | 8.8¹⁾ | n.t. | 3.4²⁾ | 3.5²⁾ | 0.3¹⁾ | 0.3¹⁾ |
| Test 2 | 9.8³⁾ | n.t. | 6.4⁴⁾ | 2.3⁴⁾ | 0.5³⁾ | 0.3³⁾ |

% D510 isomerization (Fc)

| | | | | | | |
|---|---|---|---|---|---|---|
| T0 | n.a. | n.a. | 0.4 | 0.4 | 0.5 | 0.4 |
| Test 1 | n.a. | n.a. | 0.4²⁾ | 0.6²⁾ | 0.6¹⁾ | 0.5¹⁾ |
| Test 2 | n.a. | n.a. | 0.7⁴⁾ | 0.7⁴⁾ | 0.7³⁾ | 0.7³⁾ |

% M541 oxidation (Fc)

| | | | | | | |
|---|---|---|---|---|---|---|
| T0 | n.a. | n.a. | 2.8 | 3 | 3.7 | 4.1 |
| Test 1 | n.a. | n.a. | 5.0²⁾ | 0.7²⁾ | 3.8¹⁾ | 3.8¹⁾ |
| Test 2 | n.a. | n.a. | 17.5⁴⁾ | 18.4⁴⁾ | 4.8³⁾ | 5.5³⁾ |

% N614 deamidation (Fc)

| | | | | | | |
|---|---|---|---|---|---|---|
| T0 | n.a. | n.a. | 1.2 | 1.2 | 1.6 | 1.5 |
| Test 1 | n.a. | n.a. | 1.3²⁾ | 1.7²⁾ | 2.8¹⁾ | 2.2¹⁾ |
| Test 2 | n.a. | n.a. | 6.1⁴⁾ | 1.9⁴⁾ | 1.9³⁾ | 2.3³⁾ |

% N673 deamidation (Fc)

| | | | | | | |
|---|---|---|---|---|---|---|
| T0 | n.a. | n.a. | 0.3 | 0.3 | 0.0 | 0.0 |
| Test 1 | n.a. | n.a. | 0.5²⁾ | 0.6²⁾ | 0.5¹⁾ | 0.6¹⁾ |
| Test 2 | n.a. | n.a. | 0.5⁴⁾ | 0.6⁴⁾ | 0.5³⁾ | 1.5³⁾ |

% M717 oxidation (Fc)

| | | | | | | |
|---|---|---|---|---|---|---|
| T0 | n.a. | n.a. | 2.1 | 2.4 | 2.5 | 2.8 |
| Test 1 | n.a. | n.a. | 4.1²⁾ | 7.3²⁾ | 2.2¹⁾ | 2.3¹⁾ |
| Test 2 | n.a. | n.a. | 13.7⁴⁾ | 13.5⁴⁾ | 2.8³⁾ | 3.8³⁾ |

% M598 oxidation (hALB)

| | | | | | | |
|---|---|---|---|---|---|---|
| T0 | 1.0 | n.t. | n.a. | n.a. | n.a. | n.a. |
| Test 1 | 2.3¹⁾ | n.t. | n.a. | n.a. | n.a. | n.a. |
| Test 2 | 6.4³⁾ | n.t. | n.a. | n.a. | n.a. | n.a. |

% M809 oxidation (hALB)

| | | | | | | |
|---|---|---|---|---|---|---|
| T0 | 1.8 | n.t. | n.a. | n.a. | n.a. | n.a. |
| Test 1 | 3.5¹⁾ | n.t. | n.a. | n.a. | n.a. | n.a. |
| Test 2 | 8.3³⁾ | n.t. | n.a. | n.a. | n.a. | n.a. |

% M840 oxidation (hALB)

| | | | | | | |
|---|---|---|---|---|---|---|
| T0 | 12.8 | n.t. | n.a. | n.a. | n.a. | n.a. |
| Test 1 | 32.0¹⁾ | n.t. | n.a. | n.a. | n.a. | n.a. |
| Test 2 | 61.7 | n.t. | n.a. | n.a. | n.a. | n.a. |

% K1036 glycation (hALB)

| | | | | | | |
|---|---|---|---|---|---|---|
| T0 | 10.1 | n.t. | n.a. | n.a. | n.a. | n.a. |
| Test 1 | 10.2¹⁾ | n.t. | n.a. | n.a. | n.a. | n.a. |
| Test 2 | 9.9³⁾ | n.t. | n.a. | n.a. | n.a. | n.a. |

¹⁾0.2 MLux visible light/25 W * h/m² UVA light,
²⁾0.2 MLux visible light without UVA light,
³⁾1.2 MLux visible light/173 W * h/m^{2,}
⁴⁾1.2 MLux visible light/30 W * h/m²

### Example 14

[0392] Different BiTE® antibody constructs designed for targeting Target C including Target C-non half-life extended (non HLE, “canonical”), Target C-hALB (comprising human serum albumin), and Target C-scFc (comprising a scFC modality as third domain as described above) were formulated in a solution comprising 100 mM L-arginine hydrochloride, 8% (w/v) Trehalose dihydrate and Polysorbate 80. The target protein concentration was 1.0 mg/mL for the hALB and scFc and 0.4 mg/mL for the non HLE version. Formulated BITE® antibody constructs were filled to 1 mL in type I glass vials which were stoppered with butyl rubber stoppers and crimped with aluminum seals. Filled vials were incubated at −20° C. and 37° C. (w/o and with 25 ppm silicon which is known for its potential to induce aggregation of proteins) for 4 weeks. Above constructs were also exposed to light (1.2 MLux visible light/173 W*h/m2 UVA light). For light stress, chamber temperature was set to 25° C. Samples stored at −70° C. served as controls (T0).

[0393] The samples described above were analyzed in duplicates by size exclusion ultra-high performance chromatography (SE-UPLC) in order to quantify the percentaged content of high molecular weight species (HMWS). SE-UPLC was performed on an Aquity H-Class UPLC system (Waters) using an Acquity UPLC BEH200 SEC 150 mm column (Waters). Column temperature was set to 25° C. Separation of size variants was achieved by applying an isocratic method with a flow rate of 0.4 mL/min. The mobile phase was composed of 100 mM sodium phosphate, 250 mM NaCl pH 6.8. The run time totals 6.0 minutes. Samples were held at 8° C. within the autosampler until analysis. A total amount of 3 μg protein was injected. In order to avoid carry over an intermediate injection with 40% ACN was performed after each sample. Detection was based on fluorescence (excitation at 280 nm, emission at 325 nm). Peak integration was performed using Empower® software. Relative area under the curve of HMWS was reported (24).

[0394] Within non-stressed samples, HMWS were least pronounced for the scFc-construct. HMWS formation was exclusively observed during 4 weeks storage at −20° C. The HMWS contents under these conditions increase in the following order scFc<hALB<non HLE.

TABLE 24
Overview on HMWS contents in stressed and unstressed
(T0) Target C-non HLE, -hALB, and -scFc preparations
determined via SE-UPLC.

| | Construct | | |
|---|---|---|---|
| | Non HLE | | |
| | (canonical) | hALB | scFc |
| T0 | 1.3% | 1.3% | 1.0% |
| 4 w −20° C. | 4.6% | 1.8% | 1.6% |
| 4 w 37° C. | 0.9% | 0.6% | 0.5% |
| 4 w 37° C. (25 ppm | 1.1% | 0.8% | 0.8% |
| silicon) | | | |
| Light exposure | 1.0% | 0.9% | 0.5% |

[0395] Additionally, samples derived from heat stress in absence and presence of silicon were assessed for the abundance of subvisible particles by Microfluid Imaging (MFI) using a Flowcam from Fluid Imaging Technologies, Inc. The instrument was equipped with a FC80FV flow cell. A tenfold optical magnification was applied. System suitability was verified with particle free water. An autoimage rate of 20 frames per second was applied. Dark and light thresholds were set to 25 and 20 pixels respectively. Sample volume for a single measurement totals 0.25 mL. Samples were measured in triplicates. Prior to each triplicate the system was flushed of 0.5 mL of the respective sample solutions. At the beginning and between each triplicate a wash with 1.0 mL particle free water was performed. Data evaluation was performed with Visual Spreadsheet software. Samples were measured in triplicates. Results are outlined in Table 25.

[0396] Heat stress resulted in subvisible particle formation in preparations containing non HLE and hALB constructs. In contrast, the scFc construct remained stable. Subvisible particle formation was not promoted by the addition of silicon independent on the nature of the BiTE® antibody construct.

TABLE 15
Assessment of subvisible particles by MFI in Target F-non HLE (canonical), -
hALB, and -scFc preparations after heat stress in absence and presence of silicon.

| | Construct | | | | | | | | | | | |
|---|---|---|---|---|---|---|---|---|---|---|---|---|
| | Non HLE (canonical) | | | | hALB | | | | scFc | | | |
| | Particle size [μm] | | | | | | | | | | | |
| | ≧2 | ≧5 | ≧10 | ≧25 | ≧2 | ≧5 | ≧10 | ≧25 | ≧2 | ≧5 | ≧10 | ≧25 |
| T0 | 146 | 35 | 12 | 0 | 281 | 71 | 35 | 0 | 298 | 150 | 33 | 0 |
| 4 w 37° C. | 410 | 163 | 23 | 0 | 742 | 225 | 11 | 0 | 110 | 44 | 0 | 0 |
| 4 w 37° C. | 69 | 35 | 11 | 0 | 272 | 91 | 34 | 0 | 146 | 55 | 11 | 0 |
| (25 ppm | | | | | | | | | | | | |
| silicon) | | | | | | | | | | | | |

[0397] Samples from heat stress were also analyzed by Weak Cation Exchange (WCX) chromatography in order to quantify the percentaged content of charge variants using a UPLC Aquity H class from Waters. A Protein-Pak Hi Res CM 7ìm 4.6×100 mm column (Waters, cat No. 186004929) was applied. The column temperature was adjusted to 30° C. The flow rate was set to 0.65 mL/min. The applied gradient was designed as follows (Table 26). The temperature of the autosampler was kept at 2-8° C.

TABLE 26
Gradient applied for WCX chromatography

| | % A | % B |
|---|---|---|
| Time | 20 mM sodium | 20 mM sodium phosphate, |
| [min:sec] | phosphate, pH 6.5 | 250 mM sodium chloride, pH 6.5 |
| 00:00 | 100 | 0 |
| 04:00 | 100 | 0 |
| 25:00 | 50 | 50 |
| 25:01 | 0 | 100 |
| 29:00 | 0 | 100 |
| 29:01 | 100 | 0 |
| 33:00 | 100 | 0 |

[0398] A total amount of 3 μg of protein was injected. Detection was based on fluorescence (excitation at 280 nm, emission at 325 nm). Peak integration was performed using Empower® software. Relative areas under the curve of the main peak as well as of acidic and basic charge variants was reported (Table 27).

[0399] Heat stress resulted in a reduced main peak percentage which had to be attributed to a predominant formation of acidic charge variants. The loss in main peak percentage was least pronounced for the scFc construct (7.5%). Basic charge variants were formed in both constructs with extended half-life upon light exposure. The increase in basic charge variants ranged between 5 and 6% in hALB and scFc constructs.

TABLE 27
Assessment of charge variants by WCX chromatography in Target F-non
HLE (canonical), -hALB, and -scFc preparations after heat and light induced stress.

| | Construct | | | | | | | | |
|---|---|---|---|---|---|---|---|---|---|
| | Non HLE (canonical) | | | hALB | | | scFc | | |
| | Fraction | | | | | | | | |
| | % | % | % | % | % | % | % | % | % |
| | main | acidics | basics | main | acidics | basics | main | acidics | basics |
| T0 | 89.9 | 3.6 | 6.5 | 83.3 | 0.7 | 16.0 | 74.5 | 3.4 | 22.1 |
| 4 w 37° C. | 79.3 | 11.1 | 9.5 | 75.6 | 9.8 | 14.6 | 67.0 | 11.2 | 21.8 |

[0400] In addition, sample purity was quantified in heat and light stressed samples using a microfluidic capillary electrophoresis sodium dodecylsulphate (CE-SDS) assay based on the LabChip GXII system (Perkin Elmer). The sample denaturing solution was composed of the HT Protein Express Sample Buffer (provided by Perkin Elmer) supplemented with 34 mM dithiothreitol. Each sample was diluted 1:8 with the denaturing solution and heated up to 70° C. for 10 minutes together with the protein express ladder. 35 μL of water for injection (WFI) were added to 40 μL of the denatured sample. 120 μL WFI were added to 12 μL of the ladder. Samples, ladder, protein express wash buffer, gel dye and destain solution are transferred to the respective reservoirs. Samples are electrokinetically loaded from a microtiter plate onto the chip integrating the separation, staining, destaining, and detection of the protein and its size variants. The resulting electropherograms were evaluated and changes in purity were reported. An overview on the percentaged purity detected post stress is given by Table 28 and compared to unstressed samples (T0).

[0401] Higher purities were observed for hALB and scFc constructs if compared to the non HLE construct under all conditions. Slight decreases in purity if compared to T0 were detected for hALB and scFc constructs upon heat and light stress. The loss in purity after 4 weeks storage at 37° C. totals 8.4% for the hALB construct and 6.6% for the scFc constructs. The losses upon light exposure were comparable between hALB and scFc.

TABLE 28
Overview on percentaged purity in stressed and unstressed
(T0) Target F-non HLE, -hALB, and -scFc preparations
determined via LabChip GXII (Caliper).

| | Construct | | |
|---|---|---|---|
| | Non HLE | | |
| | (canonical) | hALB | scFc |
| T0 | 57.4 | 96.0 | 92.2 |
| 4 w 37° C. | 60.6 | 87.6 | 85.6 |
| Light exposure | 61.5 | 90.1 | 86.4 |

### Example 15

[0402] Different BiTE® antibody constructs designed for targeting Target D including Target D-hALB and Target D-scFc were formulated at pH 7.0. The target protein concentration was 1.0 mg/mL for both constructs. Formulated BiTE® antibody constructs were filled to 1 mL in type I glass vials which were stoppered with butyl rubber stoppers and crimped with aluminum seals. Filled vials were incubated at 37° C. (Target D-hALB) and 40° C. (Target D-scFc) for 4 weeks. Samples stored at −70° C. served as controls (T0). Samples were analyzed by SE-UPLC according to the method described under Error! Reference source not found.4. Results are outlined in Table 29.

[0403] The scFc construct exhibited a reduced monomer loss (2.3%) upon heat stress if compared to the hALB construct (4.0%) although the incubation temperature was slightly higher.

TABLE 29
Overview on monomer peak percentage in stressed
and unstressed (T0) Target D-hALB and -scFc
preparations determined via SE-UPLC.

Construct

| | hALB | scFc |
|---|---|---|
| T0 | 97.6% | 99.8% |
| 4 w | 93.6% | 97.5% |

### Example 16

[0404] Different BiTE® antibody constructs designed for targeting PSMA including PSMA-non HLE (canonical) and PSMA-scFc were examined. The target protein concentration was 1.0 mg/mL. Formulated BiTE® antibody constructs were filled to 1 mL in type I glass vials which were stoppered with butyl rubber stoppers and crimped with aluminum seals. Filled vials were incubated at −20° C. and 37° C. (w/o and with 25 ppm silicon) for 4 weeks. Above constructs were also exposed to light (1.2 MLux visible light/173 W*h/m² UVA light). For light stress chamber temperature was set to 25° C. Samples stored at −70° C. served as controls (T0). All samples were analyzed by SE-UPLC according to the method described under Error! Reference source not found.4. Results are outlined in Table 30. The scFc construct showed higher monomer contents than the non HLE construct under all tested stress conditions indicating a lower propensity to the formation of high (aggregates) or low molecular weight species (fragments) of the scFc construct.

TABLE 30
Overview on monomer contents in stressed and unstressed (T0)
PSMA-non HLE and -scFc preparations determined via SE-UPLC.

Construct

| | Non-HLE | |
|---|---|---|
| | (canonical) | scFc |
| T0 | 97.0% | 98.6% |
| 4 w −20° C. | 96.7% | 98.9% |
| 4 w 37° C. | 88.3% | 94.1% |
| 4 w 37° C. | 90.4% | 96.1% |
| (25 ppm silicon) | | |
| Light exposure | 96.1% | 99.0% |

[0405] Additionally, samples derived from heat stress in absence and presence of silicon were assessed for the abundance of subvisible particles by Microfluid Imaging (MFI) using the method described under Error! Reference source not found.4. Results are outlined in Table 31.

[0406] The scFc construct revealed a significantly lower abundance of subvisible particles than the non HLE construct when subjected to heat stress in absence and presence of silicon.

TABLE 31
Assessment of subvisible particles by MFI in PSMA-non HLE
(canonical) and -scFc preparations after heat stress in absence
and presence of silicon.

| | Construct | | | | | | | |
|---|---|---|---|---|---|---|---|---|
| | Non-HLE (canonical) | | | | scFc | | | |
| | Particle size [μm] | | | | | | | |
| | ≧2 | ≧5 | ≧10 | ≧25 | ≧2 | ≧5 | ≧10 | ≧25 |
| 4 w 37° C. | 4675 | 2334 | 1017 | 22 | 2518 | 1364 | 655 | 24 |
| 4 w 37° C. | 8249 | 4243 | 1906 | 34 | 965 | 473 | 179 | 11 |
| (25 ppm | | | | | | | | |
| silicon) | | | | | | | | |

[0407] Samples from heat and light stress were also analyzed by Weak Cation Exchange (WCX) chromatography in order to quantify the percentaged content of charge variants using a UPLC Aquity H class from Waters according to the method described under Error! Reference source not found.4. Relative areas under the curve of the main peak as well as of acidic and basic charge variants was reported (Table 32).

[0408] The scFc construct showed higher main peak percentages (lower amount of charge variants) than the non HLE construct. This difference was most pronounced when comparing samples subjected to heat stress indicating a higher chemical stability of the scFc construct.

TABLE 32
Assessment of charge variants by WCX chromatography in PSMA-non
HLE (canonical) and -scFc preparations after heat and light induced stress.

| | Construct | | | | | |
|---|---|---|---|---|---|---|
| | Non HLE (canonical) | | | scFc | | |
| | Fraction | | | | | |
| | % | % | % | % | % | % |
| | main | acidics | basics | main | acidics | basics |
| T0 | 66.1 | 18.4 | 15.6 | 70.4 | 14.5 | 15.1 |
| 4 w 37° C. | 32.1 | 51.8 | 16.1 | 41.5 | 45.6 | 12.9 |
| Light | 68.0 | 24.6 | 7.4 | 69.9 | 12.6 | 17.5 |
| exposure | | | | | | |

[0409] In addition, sample purity was quantified in heat and light stressed samples using a microfluidic capillary electrophoresis sodium dodecylsulphate (CE-SDS) assay based on the LabChip GXII system (Perkin Elmer) according to the method described under Error! Reference source not found.4. An overview on the percentaged purity detected post stress is given by Table 33 and compared to unstressed samples (T0).

[0410] Higher purities were observed for the scFc construct if compared to the non HLE construct irrespective of the stress conditions. Hence, as exemplified hereby, scFc antibody constructs are more stable over a broad array of stress conditions than non-HLE antibody constructs and, thus, safer and better suited for versatile clinical employment with ever changing stress conditions in practice.

TABLE 33
Overview on percentaged purity in stressed and unstressed (T0) PSMA-
non HLE, and -scFc preparations determined via LabChip GXII.

Construct

| | Non-HLE | |
|---|---|---|
| | (canonical) | scFc |
| T0 | 89.2 | 100.0 |
| 4 w 37° C. | 85.4 | 87.3 |
| Light exposure | 89.5 | 93.8 |

### Example 17

[0411] Different BiTE® antibody constructs designed for targeting Target B including Target B-Xbody and Target B-scFc were examined. The target protein concentration was 1.0 mg/mL. Formulated BiTE® antibody constructs were filled to 1 mL in type I glass vials which were stoppered with butyl rubber stoppers and crimped with aluminum seals. Filled vials were incubated at −20° C. and 37° C. for 4 weeks. Additionally, all samples were exposed to 1.2 MLux visible light and 173 W*h/m² UVA light. Chamber temperature was adjusted to 25° C. Samples stored at −70° C. served as controls (T0). Samples stored at −20 and −37° C. were analyzed by SE-UPLC according to the method described under Error! Reference source not found.4. Results are outlined in Table 34.

[0412] The scFc construct preserved a higher monomer content when stored for four weeks at −20 and 37° C. respectively if compared to the Xbody.

TABLE 34
Overview on monomer contents in stressed and unstressed (T0)
Target B-Xbody and -scFc preparations determined via SE-UPLC.

Construct

| | Xbody | scFc |
|---|---|---|
| T0 | 100.0 | 98.8 |
| 4 w −20° C. | 97.1 | 97.9 |
| 4 w 37° C. | 94.5 | 95.7 |

[0413] Additionally, unstressed samples were assessed for the abundance of subvisible particles by Microfluid Imaging (MFI) using the method described under Error! Reference source not found.4. Results are outlined in Table 35. The CD19-scFc preparation exhibited significantly lower amounts of subvisible particles if compared to the CD19-Xbody preparation. This applies to all included size fractions.

TABLE 35
Assessment of subvisible particles by MFI in unstressed Target B-Xbody
and -scFc

| | Construct | | | | | | | |
|---|---|---|---|---|---|---|---|---|
| | Xbody | | | | scFc | | | |
| | Particle size [μm] | | | | | | | |
| | ≧2 | ≧5 | ≧10 | ≧25 | ≧2 | ≧5 | ≧10 | ≧25 |
| T0 | 2648 | 688 | 192 | 32 | 160 | 64 | 43 | 11 |

[0414] Samples from light stress were also analyzed by Weak Cation Exchange (WCX) chromatography in order to quantify the percentaged content of charge variants using a UPLC Aquity H class from Waters according to the method described under Error! Reference source not found.4. Relative areas under the curve of the main peak as well as of acidic and basic charge variants was reported (Table 36).

TABLE 36
Assessment of charge variants by WCX chromatography in Target
B-Xbody and -scFc preparations after heat and light induced stress.

| | Construct | | | | | |
|---|---|---|---|---|---|---|
| | Xbody | | | scFc | | |
| | Fraction | | | | | |
| | % | % | % | % | % | % |
| | main | acidics | basics | main | acidics | basics |
| T0 | 51.4 | 30.3 | 18.3 | 83.5 | 1.3 | 15.2 |
| Light | 45.9 | 33.2 | 20.9 | 82.1 | 1.2 | 16.7 |
| exposure | | | | | | |

[0415] The scFc construct showed surprisingly enhanced stability against light exposure if compared to the Xbody indicated by a less pronounced loss in main peak which totaled 1.4% compared to 5.5% for the Xbody construct. Hence, it can derived from said exemplarily setting that an anti-PSMA antibody construct provided with a scFc domain as HLE is superior to other antibody constructs comprising different HLE in terms of stress resistance and, in consequence, features surprisingly improved stability.

### Example 18 Size Exclusion Chromatography of Bispecific scFc Variants

[0416] The constructs D9F, T2G, D3L, T7I and K6C (see FIG. 6) were each tested for their running behavior by size exclusion chromatography according to standard procedures. In detail, a defined amount of 25 μg of each construct were run (at 750 μl/min) in Citrate Lysin Buffer (10 mM and 75 mM, pH7) on a Superdex 200 increase 10/300GL column at room temperature and the OD 280 nm was recorded. Subsequently, constructs have been compared by their retention times. As a result, construct D9F shows significantly delayed elution (Table 37) as compared to T2G, D3L, T7I and K6C, which indicates a difference in the structure/arrangement of the Fc domains. This difference in retention time was most significant with construct T7I having unpaired cysteines in the hinge region and the linkage of CH2 and CH2CH3 to CH3 (18.98 min vs. 18.62 min, difference of 0.36 min). However, also the difference in retention time of 0.16 min between D9F and T2G is significant taking the respective retention time of the BSA control into consideration. The BSA control showed a retention time of 19.07 min for the monomer and 16.82 min for the dimer displaying a difference of 2.25 min in retention time for a doubled molecular weight. Hence, as the constructs having only structural differences in the Fc part, 0.16 min difference in retention time are significant. In summary, construct D9F showed the longest retention time indicating the strongest binding. This conclusion leads to the expectation of D9F also has the longest half live in vivo.

TABLE 37

| Construct | Retention time in min |
|---|---|
| D9F | 18.98 |
| T2G | 18.82 |
| D3L | 18.78 |
| K6C | 18.77 |
| T7I | 18.62 |
| BSA monomer | 19.07 |
| BSA dimer | 16.82 |

### Example 19: Surface Plasmon Resonance-Based Determination of Binding to Human FcRn (FCGRT/B2M)

[0417] The constructs D9F, T2G, D3L, T7I and K6C (FIG. 6) were each tested for their capability of binding against human FcRn in SPR (Biacore) experiments according to standard procedures. In detail, CM5 Sensor Chips (GE Healthcare) were immobilized with 450-500 RU of FCGRT/B2M (ACRO Biosystems) by using Na acetate buffer pH 4.5 and a running buffer consisting of 200 mM HEPES, 150 mM NaCl, 3 mM EDTA pH 6.0. The constructs were then injected in subsequent runs in two concentrations of 250 nM and 125 nM diluted in 200 mM HEPES, 150 mM NaCl, 3 mM EDTA, pH 6.0 and 36° C. Association was done for 90 seconds with a 30 μl/min flow rate followed by the dissociation phase for 90 seconds at a 30 μl/min flow rate in 200 mM HEPES, 150 mM NaCl, 3 mM EDTA, pH 6.0 at 36° C. Subsequent regeneration was done for 10 sec with 30 μl/min with 10 mM HEPES, 150 mM NaCl, 3 mM EDTA pH 7.4.

[0418] The maximal binding during the injection phase was measured for all constructs as the respective response units (RU), equivalent to the molecular mass increase on the FcRn coated CM5 chip due to bound construct. All constructs were measured in duplicates. Average values of the duplicate determinations are depicted in FIGS. 7A and 7B, respectively.

[0419] As a result, construct D9F shows significantly higher mass increase on the FcRn coated CM5 chip, as compared to T2G, D3L, T7I and K6C, which indicates stronger binding affinity of D9F to human FcRn. This observation was seen for both concentrations of the respective constructs.

[0420] The binding against FcRn is mediated through the Fc portion within the constructs. Stronger binding against human FcRn as described in the literature is an indicator for longer halflife in vivo due to a higher intracellular rescue of the respective protein and a therefore reduced degradation rate. For this reason, stronger binding of D9F to human FcRn as compared to the other constructs makes this molecule clearly superior as a basis for therapeutic molecules to allow for longer exposure of the potential drug in the patient and a lower frequency of drug administration.

### Example 20: Surface Plasmon Resonance-Based Determination of Binding to Human FcRn (FCGRT/B2M)

[0421] The constructs D9F, T2G, D3L, T7I and K6C and a human IgG1-kappa antibody MT201 were each tested for their capability of binding against human FcRn in SPR (Biacore) experiments according to standard procedures. In detail, CM5 Sensor Chips (GE Healthcare) were immobilized with around 350 RU of FCGRT/B2M (ACRO Biosystems) by using Na acetate buffer pH 4.5 and a running buffer consisting of 200 mM HEPES, 150 mM NaCl, 3 mM EDTA pH 6.0. The constructs and the human IgG1-kappa control (MT201) were then injected at a concentration of 125 nM diluted in 200 mM HEPES, 150 mM NaCl, 3 mM EDTA, pH 6.0 and 36° C. Association was done for 90 seconds with a 30 μl/min flow rate followed by the dissociation phase for 60 seconds at a 30 μl/min flow rate in 200 mM HEPES, 150 mM NaCl, 3 mM EDTA, pH 6.0 at 36° C. Subsequent regeneration was done for 10 sec with 30 μl/min with 10 mM HEPES, 150 mM NaCl, 3 mM EDTA pH 7.4.

[0422] The maximal binding during the injection phase was measured for all constructs as the respective response units (RU), equivalent to the molecular mass increase on the FcRn coated CM5 chip due to bound construct. All constructs were measured in duplicates. Average values of the duplicate determinations are depicted in FIG. 8 including standard deviation error bars.

[0423] As a result, construct D9F shows significantly higher mass increase on the FcRn coated CM5 chip, as compared to T2G, D3L, T7I and K6C, which indicates stronger binding affinity of D9F to human FcRn. The mass increase on the FcRn-coated CM5 chip for D9F is well comparable to the mass increase of the human IgG1-kappa control antibody MT201, indicating a comparable binding of construct D9F to human FcRn.

[0424] The binding against FcRn is mediated through the human IgG1 Fc portion within the constructs. Stronger binding against human FcRn as described in the field is an indicator for longer half-life in vivo due to a higher intracellular rescue of the respective protein and a therefore reduced degradation rate. For this reason, stronger binding of D9F to human FcRn in the range of a human IgG1-kappa antibody (MT201), as compared to the other constructs makes this molecule clearly superior as a basis for therapeutic molecules to allow for longer exposure of the potential drug in the patient, presumably in the range of a full human IgG1 antibody, and a lower frequency of drug administration.

TABLE 38
Sequence Table

| SEQ ID | | Format/ | |
|---|---|---|---|
| NO: | Designation | Source | Sequence |
| 1. | G4S linker | | GGGGS |
| 2. | (G4S)2 linker | | GGGGSGGGGS |
| 3. | (G4S)3 linker | | GGGGSGGGGSGGGGS |
| 4. | (G4S)4 linker | | GGGGSGGGGSGGGGSGGGGS |
| 5. | (G4S)5 linker | | GGGGSGGGGSGGGGSGGGGSGGGGS |
| 6. | (G4S)6 linker | | GGGGSGGGGSGGGGSGGGGSGGGGSGGGGS |
| 7. | (G4S)7 linker | | GGGGSGGGGSGGGGSGGGGSGGGGSGGGGSGGGGS |
| 8. | (G4S)8 linker | | GGGGSGGGGSGGGGSGGGGSGGGGSGGGGSGGGGSGGGGS |
| 9. | Peptide | | PGGGGS |
| | linker | | |
| 10. | Peptide | | PGGDGS |
| | linker | | |
| 11. | Peptide | | SGGGGS |
| | linker | | |
| 12. | Peptide | | GGGG |
| | linker | | |
| 13. | CD3ε binder | | QTVVTQEPSLTVSPGGTVTLTCGSSTGAVTSGNYPNWVQQKPGQAPR |
| | VL | | GLIGGTKFLAPGTPARFSGSLLGGKAALTLSGVQPEDEAEYYCVLWY |
| | | | SNRWVFGGGTKLTVL |
| 14. | CD3ε binder | | EVQLVESGGGLVQPGGSLRLSCAASGFTFNSYAMNWVRQAPGKGLEW |
| | VH | | VARIRSKYNNYATYYADSVKGRFTISRDDSKNTAYLQMNSLKTEDTA |
| | | | VYYCVRHGNFGNSYVSWWAYWGQGTLVTVSS |
| 15. | CD3ε binder | | EVQLVESGGGLVQPGGSLRLSCAASGFTFNSYAMNWVRQAPGKGLEW |
| | scFv | | VARIRSKYNNYATYYADSVKGRFTISRDDSKNTAYLQMNSLKTEDTA |
| | | | VYYCVRHGNFGNSYVSWWAYWGQGTLVTVSSGGGGSGGGGSGGGGSQ |
| | | | TVVTQEPSLTVSPGGTVTLTCGSSTGAVTSGNYPNWVQQKPGQAPRG |
| | | | LIGGTKFLAPGTPARFSGSLLGGKAALTLSGVQPEDEAEYYCVLWYS |
| | | | NRWVFGGGTKLTVL |
| 16. | hexa- | | HHHHHH |
| | histidine tag | | |
| 17. | Fc monomer- | | DKTHTCPPCPAPELLGGPSVFLFPPKPKDTLMISRTPEVTCVVVDVS |
| | 1 | | HEDPEVKFNWYVDGVEVHNAKTKPCEEQYGSTYRCVSVLTVLHQDWL |
| | +c/-g | | NGKEYKCKVSNKALPAPIEKTISKAKGQPREPQVYTLPPSREEMTKN |
| | | | QVSLTCLVKGFYPSDIAVEWESNGQPENNYKTTPPVLDSDGSFFLYS |
| | | | KLTVDKSRWQQGNVFSCSVMHEALHNHYTQKSLSLSPGK |
| 18. | Fc monomer- | | DKTHTCPPCPAPELLGGPSVFLFPPKPKDTLMISRTPEVTCVVVDVS |
| | 2 | | HEDPEVKFNWYVDGVEVHNAKTKPCEEQYGSTYRCVSVLTVLHQDWL |
| | +c/-g/delGK | | NGKEYKCKVSNKALPAPIEKTISKAKGQPREPQVYTLPPSREEMTKN |
| | | | QVSLTCLVKGFYPSDIAVEWESNGQPENNYKTTPPVLDSDGSFFLYS |
| | | | KLTVDKSRWQQGNVFSCSVMHEALHNHYTQKSLSLSP |
| 19. | Fc monomer- | | DKTHTCPPCPAPELLGGPSVFLFPPKPKDTLMISRTPEVTCVVVDVS |
| | 3 | | HEDPEVKFNWYVDGVEVHNAKTKPREEQYNSTYRVVSVLTVLHQDWL |
| | -c/+g | | NGKEYKCKVSNKALPAPIEKTISKAKGQPREPQVYTLPPSREEMTKN |
| | | | QVSLTCLVKGFYPSDIAVEWESNGQPENNYKTTPPVLDSDGSFFLYS |
| | | | KLTVDKSRWQQGNVFSCSVMHEALHNHYTQKSLSLSPGK |
| 20. | Fc monomer- | | DKTHTCPPCPAPELLGGPSVFLFPPKPKDTLMISRTPEVTCVVVDVS |
| | 4 | | HEDPEVKFNWYVDGVEVHNAKTKPREEQYNSTYRVVSVLTVLHQDWL |
| | -c/+g/delGK | | NGKEYKCKVSNKALPAPIEKTISKAKGQPREPQVYTLPPSREEMTKN |
| | | | QVSLTCLVKGFYPSDIAVEWESNGQPENNYKTTPPVLDSDGSFFLYS |
| | | | KLTVDKSRWQQGNVFSCSVMHEALHNHYTQKSLSLSP |
| 21. | Fc monomer- | | DKTHTCPPCPAPELLGGPSVFLFPPKPKDTLMISRTPEVTCVVVDVS |
| | 5 | | HEDPEVKFNWYVDGVEVHNAKTKPREEQYGSTYRVVSVLTVLHQDWL |
| | -c/-g | | NGKEYKCKVSNKALPAPIEKTISKAKGQPREPQVYTLPPSREEMTKN |
| | | | QVSLTCLVKGFYPSDIAVEWESNGQPENNYKTTPPVLDSDGSFFLYS |
| | | | KLTVDKSRWQQGNVFSCSVMHEALHNHYTQKSLSLSPGK |
| 22. | Fc monomer- | | DKTHTCPPCPAPELLGGPSVFLFPPKPKDTLMISRTPEVTCVVVDVS |
| | 6 | | HEDPEVKFNWYVDGVEVHNAKTKPREEQYGSTYRVVSVLTVLHQDWL |
| | -c/-g/delGK | | NGKEYKCKVSNKALPAPIEKTISKAKGQPREPQVYTLPPSREEMTKN |
| | | | QVSLTCLVKGFYPSDIAVEWESNGQPENNYKTTPPVLDSDGSFFLYS |
| | | | KLTVDKSRWQQGNVFSCSVMHEALHNHYTQKSLSLSP |
| 23. | Fc monomer- | | DKTHTCPPCPAPELLGGPSVFLFPPKPKDTLMISRTPEVTCVVVDVS |
| | 7 | | HEDPEVKFNWYVDGVEVHNAKTKPCEEQYNSTYRCVSVLTVLHQDWL |
| | +c/+g | | NGKEYKCKVSNKALPAPIEKTISKAKGQPREPQVYTLPPSREEMTKN |
| | | | QVSLTCLVKGFYPSDIAVEWESNGQPENNYKTTPPVLDSDGSFFLYS |
| | | | KLTVDKSRWQQGNVFSCSVMHEALHNHYTQKSLSLSPGK |
| 24. | Fc monomer- | | DKTHTCPPCPAPELLGGPSVFLFPPKPKDTLMISRTPEVTCVVVDVS |
| | 8 | | HEDPEVKFNWYVDGVEVHNAKTKPCEEQYNSTYRCVSVLTVLHQDWL |
| | +c/+g/delGK | | NGKEYKCKVSNKALPAPIEKTISKAKGQPREPQVYTLPPSREEMTKN |
| | | | QVSLTCLVKGFYPSDIAVEWESNGQPENNYKTTPPVLDSDGSFFLYS |
| | | | KLTVDKSRWQQGNVFSCSVMHEALHNHYTQKSLSLSP |
| 25. | scFc-1 | | DKTHTCPPCPAPELLGGPSVFLFPPKPKDTLMISRTPEVTCVVVDVS |
| | | | HEDPEVKFNWYVDGVEVHNAKTKPCEEQYGSTYRCVSVLTVLHQDWL |
| | | | NGKEYKCKVSNKALPAPIEKTISKAKGQPREPQVYTLPPSREEMTKN |
| | | | QVSLTCLVKGFYPSDIAVEWESNGQPENNYKTTPPVLDSDGSFFLYS |
| | | | KLTVDKSRWQQGNVFSCSVMHEALHNHYTQKSLSLSPGKGGGGSGGG |
| | | | GSGGGGSGGGGSGGGGSGGGGSDKTHTCPPCPAPELLGGPSVFLFPP |
| | | | KPKDTLMISRTPEVTCVVVDVSHEDPEVKFNWYVDGVEVHNAKTKPC |
| | | | EEQYGSTYRCVSVLTVLHQDWLNGKEYKCKVSNKALPAPIEKTISKA |
| | | | KGQPREPQVYTLPPSREEMTKNQVSLTCLVKGFYPSDIAVEWESNGQ |
| | | | PENNYKTTPPVLDSDGSFFLYSKLTVDKSRWQQGNVFSCSVMHEALH |
| | | | NHYTQKSLSLSPGK |
| 26. | scFc-2 | | DKTHTCPPCPAPELLGGPSVFLFPPKPKDTLMISRTPEVTCVVVDVS |
| | | | HEDPEVKFNWYVDGVEVHNAKTKPCEEQYGSTYRCVSVLTVLHQDWL |
| | | | NGKEYKCKVSNKALPAPIEKTISKAKGQPREPQVYTLPPSREEMTKN |
| | | | QVSLTCLVKGFYPSDIAVEWESNGQPENNYKTTPPVLDSDGSFFLYS |
| | | | KLTVDKSRWQQGNVFSCSVMHEALHNHYTQKSLSLSPGGGGSGGGGS |
| | | | GGGGSGGGGSGGGGSGGGGSDKTHTCPPCPAPELLGGPSVFLFPPKP |
| | | | KDTLMISRTPEVTCVVVDVSHEDPEVKFNWYVDGVEVHNAKTKPCEE |
| | | | QYGSTYRCVSVLTVLHQDWLNGKEYKCKVSNKALPAPIEKTISKAKG |
| | | | QPREPQVYTLPPSREEMTKNQVSLTCLVKGFYPSDIAVEWESNGQPE |
| | | | NNYKTTPPVLDSDGSFFLYSKLTVDKSRWQQGNVFSCSVMHEALHNH |
| | | | YTQKSLSLSP |
| 27. | scFc-3 | | DKTHTCPPCPAPELLGGPSVFLFPPKPKDTLMISRTPEVTCVVVDVS |
| | | | HEDPEVKFNWYVDGVEVHNAKTKPREEQYNSTYRVVSVLTVLHQDWL |
| | | | NGKEYKCKVSNKALPAPIEKTISKAKGQPREPQVYTLPPSREEMTKN |
| | | | QVSLTCLVKGFYPSDIAVEWESNGQPENNYKTTPPVLDSDGSFFLYS |
| | | | KLTVDKSRWQQGNVFSCSVMHEALHNHYTQKSLSLSPGKGGGGSGGG |
| | | | GSGGGGSGGGGSGGGGSGGGGSDKTHTCPPCPAPELLGGPSVFLFPP |
| | | | KPKDTLMISRTPEVTCVVVDVSHEDPEVKFNWYVDGVEVHNAKTKPR |
| | | | EEQYNSTYRVVSVLTVLHQDWLNGKEYKCKVSNKALPAPIEKTISKA |
| | | | KGQPREPQVYTLPPSREEMTKNQVSLTCLVKGFYPSDIAVEWESNGQ |
| | | | PENNYKTTPPVLDSDGSFFLYSKLTVDKSRWQQGNVFSCSVMHEALH |
| | | | NHYTQKSLSLSPGK |
| 28. | scFc-4 | | DKTHTCPPCPAPELLGGPSVFLFPPKPKDTLMISRTPEVTCVVVDVS |
| | | | HEDPEVKFNWYVDGVEVHNAKTKPREEQYNSTYRVVSVLTVLHQDWL |
| | | | NGKEYKCKVSNKALPAPIEKTISKAKGQPREPQVYTLPPSREEMTKN |
| | | | QVSLTCLVKGFYPSDIAVEWESNGQPENNYKTTPPVLDSDGSFFLYS |
| | | | KLTVDKSRWQQGNVFSCSVMHEALHNHYTQKSLSLSPGGGGSGGGGS |
| | | | GGGGSGGGGSGGGGSGGGGSDKTHTCPPCPAPELLGGPSVFLFPPKP |
| | | | KDTLMISRTPEVTCVVVDVSHEDPEVKFNWYVDGVEVHNAKTKPREE |
| | | | QYNSTYRVVSVLTVLHQDWLNGKEYKCKVSNKALPAPIEKTISKAKG |
| | | | QPREPQVYTLPPSREEMTKNQVSLTCLVKGFYPSDIAVEWESNGQPE |
| | | | NNYKTTPPVLDSDGSFFLYSKLTVDKSRWQQGNVFSCSVMHEALHNH |
| | | | YTQKSLSLSP |
| 29. | scFc-5 | | DKTHTCPPCPAPELLGGPSVFLFPPKPKDTLMISRTPEVTCVVVDVS |
| | | | HEDPEVKFNWYVDGVEVHNAKTKPREEQYGSTYRVVSVLTVLHQDWL |
| | | | NGKEYKCKVSNKALPAPIEKTISKAKGQPREPQVYTLPPSREEMTKN |
| | | | QVSLTCLVKGFYPSDIAVEWESNGQPENNYKTTPPVLDSDGSFFLYS |
| | | | KLTVDKSRWQQGNVFSCSVMHEALHNHYTQKSLSLSPGKGGGGSGGG |
| | | | GSGGGGSGGGGSGGGGSGGGGSDKTHTCPPCPAPELLGGPSVFLFPP |
| | | | KPKDTLMISRTPEVTCVVVDVSHEDPEVKFNWYVDGVEVHNAKTKPR |
| | | | EEQYGSTYRVVSVLTVLHQDWLNGKEYKCKVSNKALPAPIEKTISKA |
| | | | KGQPREPQVYTLPPSREEMTKNQVSLTCLVKGFYPSDIAVEWESNGQ |
| | | | PENNYKTTPPVLDSDGSFFLYSKLTVDKSRWQQGNVFSCSVMHEALH |
| | | | NHYTQKSLSLSPGK |
| 30. | scFc-6 | | DKTHTCPPCPAPELLGGPSVFLFPPKPKDTLMISRTPEVTCVVVDVS |
| | | | HEDPEVKFNWYVDGVEVHNAKTKPREEQYGSTYRVVSVLTVLHQDWL |
| | | | NGKEYKCKVSNKALPAPIEKTISKAKGQPREPQVYTLPPSREEMTKN |
| | | | QVSLTCLVKGFYPSDIAVEWESNGQPENNYKTTPPVLDSDGSFFLYS |
| | | | KLTVDKSRWQQGNVFSCSVMHEALHNHYTQKSLSLSPGGGGSGGGGS |
| | | | GGGGSGGGGSGGGGSGGGGSDKTHTCPPCPAPELLGGPSVFLFPPKP |
| | | | KDTLMISRTPEVTCVVVDVSHEDPEVKFNWYVDGVEVHNAKTKPREE |
| | | | QYGSTYRVVSVLTVLHQDWLNGKEYKCKVSNKALPAPIEKTISKAKG |
| | | | QPREPQVYTLPPSREEMTKNQVSLTCLVKGFYPSDIAVEWESNGQPE |
| | | | NNYKTTPPVLDSDGSFFLYSKLTVDKSRWQQGNVFSCSVMHEALHNH |
| | | | YTQKSLSLSP |
| 31. | scFc-7 | | DKTHTCPPCPAPELLGGPSVFLFPPKPKDTLMISRTPEVTCVVVDVS |
| | | | HEDPEVKFNWYVDGVEVHNAKTKPCEEQYNSTYRCVSVLTVLHQDWL |
| | | | NGKEYKCKVSNKALPAPIEKTISKAKGQPREPQVYTLPPSREEMTKN |
| | | | QVSLTCLVKGFYPSDIAVEWESNGQPENNYKTTPPVLDSDGSFFLYS |
| | | | KLTVDKSRWQQGNVFSCSVMHEALHNHYTQKSLSLSPGKGGGGSGGG |
| | | | GSGGGGSGGGGSGGGGSGGGGSDKTHTCPPCPAPELLGGPSVFLFPP |
| | | | KPKDTLMISRTPEVTCVVVDVSHEDPEVKFNWYVDGVEVHNAKTKPC |
| | | | EEQYNSTYRCVSVLTVLHQDWLNGKEYKCKVSNKALPAPIEKTISKA |
| | | | KGQPREPQVYTLPPSREEMTKNQVSLTCLVKGFYPSDIAVEWESNGQ |
| | | | PENNYKTTPPVLDSDGSFFLYSKLTVDKSRWQQGNVFSCSVMHEALH |
| | | | NHYTQKSLSLSPGK |
| 32. | scFc-8 | | DKTHTCPPCPAPELLGGPSVFLFPPKPKDTLMISRTPEVTCVVVDVS |
| | | | HEDPEVKFNWYVDGVEVHNAKTKPCEEQYNSTYRCVSVLTVLHQDWL |
| | | | NGKEYKCKVSNKALPAPIEKTISKAKGQPREPQVYTLPPSREEMTKN |
| | | | QVSLTCLVKGFYPSDIAVEWESNGQPENNYKTTPPVLDSDGSFFLYS |
| | | | KLTVDKSRWQQGNVFSCSVMHEALHNHYTQKSLSLSPGGGGSGGGGS |
| | | | GGGGSGGGGSGGGGSGGGGSDKTHTCPPCPAPELLGGPSVFLFPPKP |
| | | | KDTLMISRTPEVTCVVVDVSHEDPEVKFNWYVDGVEVHNAKTKPCEE |
| | | | QYNSTYRCVSVLTVLHQDWLNGKEYKCKVSNKALPAPIEKTISKAKG |
| | | | QPREPQVYTLPPSREEMTKNQVSLTCLVKGFYPSDIAVEWESNGQPE |
| | | | NNYKTTPPVLDSDGSFFLYSKLTVDKSRWQQGNVFSCSVMHEALHNH |
| | | | YTQKSLSLSP |
| 33. | Target A-HLE | Hetero Fc | QVQLVESGGGLVKPGGSLRLSCAASGFTFSDYYMTWIRQAPGKGLEW |
| | | chain 1 | LSYISSSGSTIYYADSVKGRFTISRDNAKNSLFLQMNSLRAEDTAVY |
| | | | YCARDRNSHFDYWGQGTLVTVSSGGGGSGGGGSGGGGSDIQMTQSPS |
| | | | SVSASVGDRVTITCRASQGINTWLAWYQQKPGKAPKLLIYGASGLQS |
| | | | GVPSRFSGSGSGTDFTLTISSLQPEDFATYYCQQAKSFPRTFGQGTK |
| | | | VEIKSGGGGSEVQLVESGGGLVQPGGSLKLSCAASGFTFNKYAMNWV |
| | | | RQAPGKGLEWVARIRSKYNNYATYYADSVKDRFTISRDDSKNTAYLQ |
| | | | MNNLKTEDTAVYYCVRHGNFGNSYISYWAYWGQGTLVTVSSGGGGSG |
| | | | GGGSGGGGSQTVVTQEPSLTVSPGGTVTLTCGSSTGAVTSGNYPNWV |
| | | | QQKPGQAPRGLIGGTKFLAPGTPARFSGSLLGGKAALTLSGVQPEDE |
| | | | AEYYCVLWYSNRWVFGGGTKLTVLGGGGDKTHTCPPCPAPELLGGPS |
| | | | VFLFPPKPKDTLMISRTPEVTCVVVDVSHEDPEVKFNWYVDGVEVHN |
| | | | AKTKPCEEQYGSTYRCVSVLTVLHQDWLNGKEYKCKVSNKALPAPIE |
| | | | KTISKAKGQPREPQVYTLPPSRKEMTKNQVSLTCLVKGFYPSDIAVE |
| | | | WESNGQPENNYKTTPPVLKSDGSFFLYSKLTVDKSRWQQGNVFSCSV |
| | | | MHEALHNHYTQKSLSLSPGK |
| 34. | Target A-HLE | Hetero Fc | DKTHTCPPCPAPELLGGPSVFLFPPKPKDTLMISRTPEVTCVVVDVS |
| | | chain 2 | HEDPEVKFNWYVDGVEVHNAKTKPCEEQYGSTYRCVSVLTVLHQDWL |
| | | | NGKEYKCKVSNKALPAPIEKTISKAKGQPREPQVYTLPPSREEMTKN |
| | | | QVSLTCLVKGFYPSDIAVEWESNGQPENNYDTTPPVLDSDGSFFLYS |
| | | | DLTVDKSRWQQGNVFSCSVMHEALHNHYTQKSLSLSPGK |
| 35. | Target A-HLE | hALB | QVQLVESGGGLVKPGGSLRLSCAASGFTFSDYYMTWIRQAPGKGLEW |
| | | fusion | LSYISSSGSTIYYADSVKGRFTISRDNAKNSLFLQMNSLRAEDTAVY |
| | | | YCARDRNSHFDYWGQGTLVTVSSGGGGSGGGGSGGGGSDIQMTQSPS |
| | | | SVSASVGDRVTITCRASQGINTWLAWYQQKPGKAPKLLIYGASGLQS |
| | | | GVPSRFSGSGSGTDFTLTISSLQPEDFATYYCQQAKSFPRTFGQGTK |
| | | | VEIKSGGGGSEVQLVESGGGLVQPGGSLKLSCAASGFTFNKYAMNWV |
| | | | RQAPGKGLEWVARIRSKYNNYATYYADSVKDRFTISRDDSKNTAYLQ |
| | | | MNNLKTEDTAVYYCVRHGNFGNSYISYWAYWGQGTLVTVSSGGGGSG |
| | | | GGGSGGGGSQTVVTQEPSLTVSPGGTVTLTCGSSTGAVTSGNYPNWV |
| | | | QQKPGQAPRGLIGGTKFLAPGTPARFSGSLLGGKAALTLSGVQPEDE |
| | | | AEYYCVLWYSNRWVFGGGTKLTVLPGGDGSDAHKSEVAHRFKDLGEE |
| | | | NFKALVLIAFAQYLQQCPFEDHVKLVNEVTEFAKTCVADESAENCDK |
| | | | SLHTLFGDKLCTVATLRETYGEMADCCAKQEPERNECFLQHKDDNPN |
| | | | LPRLVRPEVDVMCTAFHDNEETFLKKYLYEIARRHPYFYAPELLFFA |
| | | | KRYKAAFTECCQAADKAACLLPKLDELRDEGKASSAKQRLKCASLQK |
| | | | FGERAFKAWAVARLSQRFPKAEFAEVSKLVTDLTKVHTECCHGDLLE |
| | | | CADDRADLAKYICENQDSISSKLKECCEKPLLEKSHCIAEVENDEMP |
| | | | ADLPSLAADFVESKDVCKNYAEAKDVFLGMFLYEYARRHPDYSVVLL |
| | | | LRLAKTYETTLEKCCAAADPHECYAKVFDEFKPLVEEPQNLIKQNCE |
| | | | LFEQLGEYKFQNALLVRYTKKVPQVSTPTLVEVSRNLGKVGSKCCKH |
| | | | PEAKRMPCAEDYLSVVLNQLCVLHEKTPVSDRVTKCCTESLVNRRPC |
| | | | FSALEVDETYVPKEFNAETFTFHADICTLSEKERQIKKQTALVELVK |
| | | | HKPKATKEQLKAVMDDFAAFVEKCCKADDKETCFAEEGKKLVAASQA |
| | | | ALGLHHHHHH |
| 36. | Target B- | X-body | EVQLVESGGGLVQPGGSLKLSCAASGFTFNKYAMNWVRQAPGKGLEW |
| | HLEa | chain 1 | VARIRSKYNNYATYYADSVKDRFTISRDDSKNTAYLQMNNLKTEDTA |
| | | | VYYCVRHGNFGNSYISYWAYWGQGTLVTVSSGGGGSGGGGSSYELTQ |
| | | | PPSVSVSPGQTASITCSGDRLGEKYTSWYQQRPGQSPLLVIYQDTKR |
| | | | PSGIPERFSGSNSGNTATLTISGTQAMDEADYYCQAWESSTVVFGGG |
| | | | TKLTVLASTKGPSVFPLAPSSKSTSGGTAALGCLVKDYFPEPVTVSW |
| | | | NSGALTSGVHTFPAVLQSSGLYSLSSVVTVPSSSLGTQTYICNVNHK |
| | | | PSNTKVDKKVEPKSCDKTHTCPPCPAPELLGGPSVFLFPPKPKDTLM |
| | | | ISRTPEVTCVVVDVSHEDPEVKFNWYVDGVEVHNAKTKPCEEQYGST |
| | | | YRCVSVLTVLHQDWLNGKEYKCKVSNKALPAPIEKTISKAKGQPREP |
| | | | QVYTLPPSREEMTKNQVSLTCLVKGFYPSDIAVEWESNGQPENNYDT |
| | | | TPPVLDSDGSFFLYSDLTVDKSRWQQGNVFSCSVMHEALHNHYTQKS |
| | | | LSLSPGK |
| 37. | Target B- | X-body | QVQLVESGGGVVQPGGSLRLSCAASGFTFSSYGMHWVRQAPGKGLEW |
| | HLEb | chain 2 | VAFIWYEGSNKYYAESVKDRFTISRDNSKNTLYLQMNSLRAEDTAVY |
| | | | YCARRAGIIGTIGYYYGMDVWGQGTTVTVSSGGGGSGGGGSQTVVTQ |
| | | | EPSLTVSPGGTVTLTCGSSTGAVTSGNYPNWVQQKPGQAPRGLIGGT |
| | | | KFLAPGTPARFSGSLLGGKAALTLSGVQPEDEAEYYCVLWYSNRWVF |
| | | | GGGTKLTVLGQPKAAPSVTLFPPSSEELQANKATLVCLISDFYPGAV |
| | | | TVAWKADSSPVKAGVETTTPSKQSNNKYAASSYLSLTPEQWKSHRSY |
| | | | SCQVTHEGSTVEKTVAPTECSDKTHTCPPCPAPELLGGPSVFLFPPK |
| | | | PKDTLMISRTPEVTCVVVDVSHEDPEVKFNWYVDGVEVHNAKTKPCE |
| | | | EQYGSTYRCVSVLTVLHQDWLNGKEYKCKVSNKALPAPIEKTISKAK |
| | | | GQPREPQVYTLPPSRKEMTKNQVSLTCLVKGFYPSDIAVEWESNGQP |
| | | | ENNYKTTPPVLKSDGSFFLYSKLTVDKSRWQQGNVFSCSVMHEALHN |
| | | | HYTQKSLSLSPGK |
| 38. | Target B-HLE | Hetero Fc | QVQLVESGGGVVQPGGSLRLSCAASGFTFSSYGMHWVRQAPGKGLEW |
| | | chain 1 | VAFIWYEGSNKYYAESVKDRFTISRDNSKNTLYLQMNSLRAEDTAVY |
| | | | YCARRAGIIGTIGYYYGMDVWGQGTTVTVSSGGGGSGGGGSGGGGSS |
| | | | YELTQPPSVSVSPGQTASITCSGDRLGEKYTSWYQQRPGQSPLLVIY |
| | | | QDTKRPSGIPERFSGSNSGNTATLTISGTQAMDEADYYCQAWESSTV |
| | | | VFGGGTKLTVLSGGGGSEVQLVESGGGLVQPGGSLKLSCAASGFTFN |
| | | | KYAMNWVRQAPGKGLEWVARIRSKYNNYATYYADSVKDRFTISRDDS |
| | | | KNTAYLQMNNLKTEDTAVYYCVRHGNFGNSYISYWAYWGQGTLVTVS |
| | | | SGGGGSGGGGSGGGGSQTVVTQEPSLTVSPGGTVTLTCGSSTGAVTS |
| | | | GNYPNWVQQKPGQAPRGLIGGTKFLAPGTPARFSGSLLGGKAALTLS |
| | | | GVQPEDEAEYYCVLWYSNRWVFGGGTKLTVLGGGGDKTHTCPPCPAP |
| | | | ELLGGPSVFLFPPKPKDTLMISRTPEVTCVVVDVSHEDPEVKFNWYV |
| | | | DGVEVHNAKTKPCEEQYGSTYRCVSVLTVLHQDWLNGKEYKCKVSNK |
| | | | ALPAPIEKTISKAKGQPREPQVYTLPPSRKEMTKNQVSLTCLVKGFY |
| | | | PSDIAVEWESNGQPENNYKTTPPVLKSDGSFFLYSKLTVDKSRWQQG |
| | | | NVFSCSVMHEALHNHYTQKSLSLSPGK |
| 39. | Target B-HLE | Hetero Fc | DKTHTCPPCPAPELLGGPSVFLFPPKPKDTLMISRTPEVTCVVVDVS |
| | | chain 2 | HEDPEVKFNWYVDGVEVHNAKTKPCEEQYGSTYRCVSVLTVLHQDWL |
| | | | NGKEYKCKVSNKALPAPIEKTISKAKGQPREPQVYTLPPSREEMTKN |
| | | | QVSLTCLVKGFYPSDIAVEWESNGQPENNYDTTPPVLDSDGSFFLYS |
| | | | DLTVDKSRWQQGNVFSCSVMHEALHNHYTQKSLSLSPGK |
| 40. | Target C-HLE | Hetero Fc | QVQLVQSGAEVKKPGESVKVSCKASGYTFTNYGMNWVKQAPGQCLEW |
| | | chain 1 | MGWINTYTGEPTYADKFQGRVTMTTDTSTSTAYMEIRNLGGDDTAVY |
| | | | YCARWSWSDGYYVYFDYWGQGTSVTVSSGGGGSGGGGSGGGGSDIVM |
| | | | TQSPDSLTVSLGERTTINCKSSQSVLDSSTNKNSLAWYQQKPGQPPK |
| | | | LLLSWASTRESGIPDRFSGSGSGTDFTLTIDSPQPEDSATYYCQQSA |
| | | | HFPITFGCGTRLEIKSGGGGSEVQLVESGGGLVQPGGSLKLSCAASG |
| | | | FTFNKYAMNWVRQAPGKGLEWVARIRSKYNNYATYYADSVKDRFTIS |
| | | | RDDSKNTAYLQMNNLKTEDTAVYYCVRHGNFGNSYISYWAYWGQGTL |
| | | | VTVSSGGGGSGGGGSGGGGSQTVVTQEPSLTVSPGGTVTLTCGSSTG |
| | | | AVTSGNYPNWVQQKPGQAPRGLIGGTKFLAPGTPARFSGSLLGGKAA |
| | | | LTLSGVQPEDEAEYYCVLWYSNRWVFGGGTKLTVLGGGGDKTHTCPP |
| | | | CPAPELLGGPSVFLFPPKPKDTLMISRTPEVTCVVVDVSHEDPEVKF |
| | | | NWYVDGVEVHNAKTKPCEEQYGSTYRCVSVLTVLHQDWLNGKEYKCK |
| | | | VSNKALPAPIEKTISKAKGQPREPQVYTLPPSRKEMTKNQVSLTCLV |
| | | | KGFYPSDIAVEWESNGQPENNYKTTPPVLKSDGSFFLYSKLTVDKSR |
| | | | WQQGNVFSCSVMHEALHNHYTQKSLSLSPGK |
| 41. | Target C-HLE | Hetero Fc | DKTHTCPPCPAPELLGGPSVFLFPPKPKDTLMISRTPEVTCVVVDVS |
| | | chain 2 | HEDPEVKFNWYVDGVEVHNAKTKPCEEQYGSTYRCVSVLTVLHQDWL |
| | | | NGKEYKCKVSNKALPAPIEKTISKAKGQPREPQVYTLPPSREEMTKN |
| | | | QVSLTCLVKGFYPSDIAVEWESNGQPENNYDTTPPVLDSDGSFFLYS |
| | | | DLTVDKSRWQQGNVFSCSVMHEALHNHYTQKSLSLSPGK |
| 42. | PM_1xCD3- | VH CDR1 | DYYMN |
| | scFc | | |
| 43. | PM_1xCD3- | VH CDR2 | IISDGGYYTYYSDIIKG |
| | scFc | | |
| 44. | PM_1xCD3- | VH CDR3 | GFPLLRHGAMDY |
| | scFc | | |
| 45. | PM_1xCD3- | VL CDR1 | KASQNVDTNVA |
| | scFc | | |
| 46. | PM_1xCD3- | VL CDR2 | SASYRYS |
| | scFc | | |
| 47. | PM_1xCD3- | VL CDR3 | QQYDSYPYT |
| | scFc | | |
| 48. | PM_1xCD3- | VH | QVQLVESGGGLVKPGESLRLSCAASGFTFSDYYMNWVRQAPGKGLEW |
| | scFc | | VAIISDGGYYTYYSDIIKGRFTISRDNAKNSLYLQMNSLKAEDTAVY |
| | | | YCARGFPLLRHGAMDYWGQGTLVTVSS |
| 49. | PM_1xCD3- | VL | DIQMTQSPSSLSASVGDRVTITCKASQNVDTNVAWYQQKPGQAPKSL |
| | scFc | | IYSASYRYSDVPSRFSGSASGTDFTLTISSLQSEDFATYYCQQYDSY |
| | | | PYTFGGGTKLEIK |
| 50. | PM_1xCD3- | scFv | QVQLVESGGGLVKPGESLRLSCAASGFTFSDYYMNWVRQAPGKGLEW |
| | scFc | | VAIISDGGYYTYYSDIIKGRFTISRDNAKNSLYLQMNSLKAEDTAVY |
| | | | YCARGFPLLRHGAMDYWGQGTLVTVSSGGGGSGGGGSGGGGSDIQMT |
| | | | QSPSSLSASVGDRVTITCKASQNVDTNVAWYQQKPGQAPKSLIYSAS |
| | | | YRYSDVPSRFSGSASGTDFTLTISSLQSEDFATYYCQQYDSYPYTFG |
| | | | GGTKLEIK |
| 51. | PM_1xCD3- | bispecific | QVQLVESGGGLVKPGESLRLSCAASGFTFSDYYMNWVRQAPGKGLEW |
| | scFc | molecule | VAIISDGGYYTYYSDIIKGRFTISRDNAKNSLYLQMNSLKAEDTAVY |
| | | | YCARGFPLLRHGAMDYWGQGTLVTVSSGGGGSGGGGSGGGGSDIQMT |
| | | | QSPSSLSASVGDRVTITCKASQNVDTNVAWYQQKPGQAPKSLIYSAS |
| | | | YRYSDVPSRFSGSASGTDFTLTISSLQSEDFATYYCQQYDSYPYTFG |
| | | | GGTKLEIKSGGGGSEVQLVESGGGLVQPGGSLKLSCAASGFTFNKYA |
| | | | MNWVRQAPGKGLEWVARIRSKYNNYATYYADSVKDRFTISRDDSKNT |
| | | | AYLQMNNLKTEDTAVYYCVRHGNFGNSYISYWAYWGQGTLVTVSSGG |
| | | | GGSGGGGSGGGGSQTVVTQEPSLTVSPGGTVTLTCGSSTGAVTSGNY |
| | | | PNWVQQKPGQAPRGLIGGTKFLAPGTPARFSGSLLGGKAALTLSGVQ |
| | | | PEDEAEYYCVLWYSNRWVFGGGTKLTVL |
| 52. | PM_1xCD3- | bispecific | QVQLVESGGGLVKPGESLRLSCAASGFTFSDYYMNWVRQAPGKGLEW |
| | scFc | HLE | VAIISDGGYYTYYSDIIKGRFTISRDNAKNSLYLQMNSLKAEDTAVY |
| | | molecule | YCARGFPLLRHGAMDYWGQGTLVTVSSGGGGSGGGGSGGGGSDIQMT |
| | | | QSPSSLSASVGDRVTITCKASQNVDTNVAWYQQKPGQAPKSLIYSAS |
| | | | YRYSDVPSRFSGSASGTDFTLTISSLQSEDFATYYCQQYDSYPYTFG |
| | | | GGTKLEIKSGGGGSEVQLVESGGGLVQPGGSLKLSCAASGFTFNKYA |
| | | | MNWVRQAPGKGLEWVARIRSKYNNYATYYADSVKDRFTISRDDSKNT |
| | | | AYLQMNNLKTEDTAVYYCVRHGNFGNSYISYWAYWGQGTLVTVSSGG |
| | | | GGSGGGGSGGGGSQTVVTQEPSLTVSPGGTVTLTCGSSTGAVTSGNY |
| | | | PNWVQQKPGQAPRGLIGGTKFLAPGTPARFSGSLLGGKAALTLSGVQ |
| | | | PEDEAEYYCVLWYSNRWVFGGGTKLTVLGGGGDKTHTCPPCPAPELL |
| | | | GGPSVFLFPPKPKDTLMISRTPEVTCVVVDVSHEDPEVKFNWYVDGV |
| | | | EVHNAKTKPCEEQYGSTYRCVSVLTVLHQDWLNGKEYKCKVSNKALP |
| | | | APIEKTISKAKGQPREPQVYTLPPSREEMTKNQVSLTCLVKGFYPSD |
| | | | IAVEWESNGQPENNYKTTPPVLDSDGSFFLYSKLTVDKSRWQQGNVF |
| | | | SCSVMHEALHNHYTQKSLSLSPGKGGGGSGGGGSGGGGSGGGGSGGG |
| | | | GSGGGGSDKTHTCPPCPAPELLGGPSVFLFPPKPKDTLMISRTPEVT |
| | | | CVVVDVSHEDPEVKFNWYVDGVEVHNAKTKPCEEQYGSTYRCVSVLT |
| | | | VLHQDWLNGKEYKCKVSNKALPAPIEKTISKAKGQPREPQVYTLPPS |
| | | | REEMTKNQVSLTCLVKGFYPSDIAVEWESNGQPENNYKTTPPVLDSD |
| | | | GSFFLYSKLTVDKSRWQQGNVFSCSVMHEALHNHYTQKSLSLSPGK |
| 53. | PM_1xCD3- | bispecific | QVQLVESGGGLVKPGESLRLSCAASGFTFSDYYMNWVRQAPGKGLEW |
| | scFc_delGK | HLE | VAIISDGGYYTYYSDIIKGRFTISRDNAKNSLYLQMNSLKAEDTAVY |
| | | molecule | YCARGFPLLRHGAMDYWGQGTLVTVSSGGGGSGGGGSGGGGSDIQMT |
| | | | QSPSSLSASVGDRVTITCKASQNVDTNVAWYQQKPGQAPKSLIYSAS |
| | | | YRYSDVPSRFSGSASGTDFTLTISSLQSEDFATYYCQQYDSYPYTFG |
| | | | GGTKLEIKSGGGGSEVQLVESGGGLVQPGGSLKLSCAASGFTFNKYA |
| | | | MNWVRQAPGKGLEWVARIRSKYNNYATYYADSVKDRFTISRDDSKNT |
| | | | AYLQMNNLKTEDTAVYYCVRHGNFGNSYISYWAYWGQGTLVTVSSGG |
| | | | GGSGGGGSGGGGSQTVVTQEPSLTVSPGGTVTLTCGSSTGAVTSGNY |
| | | | PNWVQQKPGQAPRGLIGGTKFLAPGTPARFSGSLLGGKAALTLSGVQ |
| | | | PEDEAEYYCVLWYSNRWVFGGGTKLTVLGGGGDKTHTCPPCPAPELL |
| | | | GGPSVFLFPPKPKDTLMISRTPEVTCVVVDVSHEDPEVKFNWYVDGV |
| | | | EVHNAKTKPCEEQYGSTYRCVSVLTVLHQDWLNGKEYKCKVSNKALP |
| | | | APIEKTISKAKGQPREPQVYTLPPSREEMTKNQVSLTCLVKGFYPSD |
| | | | IAVEWESNGQPENNYKTTPPVLDSDGSFFLYSKLTVDKSRWQQGNVF |
| | | | SCSVMHEALHNHYTQKSLSLSPGGGGSGGGGSGGGGSGGGGSGGGGS |
| | | | GGGGSDKTHTCPPCPAPELLGGPSVFLFPPKPKDTLMISRTPEVTCV |
| | | | VVDVSHEDPEVKFNWYVDGVEVHNAKTKPCEEQYGSTYRCVSVLTVL |
| | | | HQDWLNGKEYKCKVSNKALPAPIEKTISKAKGQPREPQVYTLPPSRE |
| | | | EMTKNQVSLTCLVKGFYPSDIAVEWESNGQPENNYKTTPPVLDSDGS |
| | | | FFLYSKLTVDKSRWQQGNVFSCSVMHEALHNHYTQKSLSLSPGK |
| 54. | PM_1_CCxCD3- | VH | QVQLVESGGGLVKPGESLRLSCAASGFTFSDYYMNWVRQAPGKCLEW |
| | scFc | | VAIISDGGYYTYYSDIIKGRFTISRDNAKNSLYLQMNSLKAEDTAVY |
| | | | YCARGFPLLRHGAMDYWGQGTLVTVSS |
| 55. | PM_1_CCxCD3- | VL | DIQMTQSPSSLSASVGDRVTITCKASQNVDTNVAWYQQKPGQAPKSL |
| | scFc | | IYSASYRYSDVPSRFSGSASGTDFTLTISSLQSEDFATYYCQQYDSY |
| | | | PYTFGCGTKLEIK |
| 56. | PM_1_CCxCD3- | scFv | QVQLVESGGGLVKPGESLRLSCAASGFTFSDYYMNWVRQAPGKCLEW |
| | scFc | | VAIISDGGYYTYYSDIIKGRFTISRDNAKNSLYLQMNSLKAEDTAVY |
| | | | YCARGFPLLRHGAMDYWGQGTLVTVSSGGGGSGGGGSGGGGSDIQMT |
| | | | QSPSSLSASVGDRVTITCKASQNVDTNVAWYQQKPGQAPKSLIYSAS |
| | | | YRYSDVPSRFSGSASGTDFTLTISSLQSEDFATYYCQQYDSYPYTFG |
| | | | CGTKLEIK |
| 57. | PM_1_CCxCD3- | bispecific | QVQLVESGGGLVKPGESLRLSCAASGFTFSDYYMNWVRQAPGKCLEW |
| | scFc | molecule | VAIISDGGYYTYYSDIIKGRFTISRDNAKNSLYLQMNSLKAEDTAVY |
| | | | YCARGFPLLRHGAMDYWGQGTLVTVSSGGGGSGGGGSGGGGSDIQMT |
| | | | QSPSSLSASVGDRVTITCKASQNVDTNVAWYQQKPGQAPKSLIYSAS |
| | | | YRYSDVPSRFSGSASGTDFTLTISSLQSEDFATYYCQQYDSYPYTFG |
| | | | CGTKLEIKSGGGGSEVQLVESGGGLVQPGGSLKLSCAASGFTFNKYA |
| | | | MNWVRQAPGKGLEWVARIRSKYNNYATYYADSVKDRFTISRDDSKNT |
| | | | AYLQMNNLKTEDTAVYYCVRHGNFGNSYISYWAYWGQGTLVTVSSGG |
| | | | GGSGGGGSGGGGSQTVVTQEPSLTVSPGGTVTLTCGSSTGAVTSGNY |
| | | | PNWVQQKPGQAPRGLIGGTKFLAPGTPARFSGSLLGGKAALTLSGVQ |
| | | | PEDEAEYYCVLWYSNRWVFGGGTKLTVL |
| 58. | PM_1_CCxCD3- | bispecific | QVQLVESGGGLVKPGESLRLSCAASGFTFSDYYMNWVRQAPGKCLEW |
| | scFc | HLE | VAIISDGGYYTYYSDIIKGRFTISRDNAKNSLYLQMNSLKAEDTAVY |
| | | molecule | YCARGFPLLRHGAMDYWGQGTLVTVSSGGGGSGGGGSGGGGSDIQMT |
| | | | QSPSSLSASVGDRVTITCKASQNVDTNVAWYQQKPGQAPKSLIYSAS |
| | | | YRYSDVPSRFSGSASGTDFTLTISSLQSEDFATYYCQQYDSYPYTFG |
| | | | CGTKLEIKSGGGGSEVQLVESGGGLVQPGGSLKLSCAASGFTFNKYA |
| | | | MNWVRQAPGKGLEWVARIRSKYNNYATYYADSVKDRFTISRDDSKNT |
| | | | AYLQMNNLKTEDTAVYYCVRHGNFGNSYISYWAYWGQGTLVTVSSGG |
| | | | GGSGGGGSGGGGSQTVVTQEPSLTVSPGGTVTLTCGSSTGAVTSGNY |
| | | | PNWVQQKPGQAPRGLIGGTKFLAPGTPARFSGSLLGGKAALTLSGVQ |
| | | | PEDEAEYYCVLWYSNRWVFGGGTKLTVLGGGGDKTHTCPPCPAPELL |
| | | | GGPSVFLFPPKPKDTLMISRTPEVTCVVVDVSHEDPEVKFNWYVDGV |
| | | | EVHNAKTKPCEEQYGSTYRCVSVLTVLHQDWLNGKEYKCKVSNKALP |
| | | | APIEKTISKAKGQPREPQVYTLPPSREEMTKNQVSLTCLVKGFYPSD |
| | | | IAVEWESNGQPENNYKTTPPVLDSDGSFFLYSKLTVDKSRWQQGNVF |
| | | | SCSVMHEALHNHYTQKSLSLSPGKGGGGSGGGGSGGGGSGGGGSGGG |
| | | | GSGGGGSDKTHTCPPCPAPELLGGPSVFLFPPKPKDTLMISRTPEVT |
| | | | CVVVDVSHEDPEVKFNWYVDGVEVHNAKTKPCEEQYGSTYRCVSVLT |
| | | | VLHQDWLNGKEYKCKVSNKALPAPIEKTISKAKGQPREPQVYTLPPS |
| | | | REEMTKNQVSLTCLVKGFYPSDIAVEWESNGQPENNYKTTPPVLDSD |
| | | | GSFFLYSKLTVDKSRWQQGNVFSCSVMHEALHNHYTQKSLSLSPGK |
| 59. | PM_1_CCxCD3- | bispecific | QVQLVESGGGLVKPGESLRLSCAASGFTFSDYYMNWVRQAPGKCLEW |
| | scFc_delGK | HLE | VAIISDGGYYTYYSDIIKGRFTISRDNAKNSLYLQMNSLKAEDTAVY |
| | | molecule | YCARGFPLLRHGAMDYWGQGTLVTVSSGGGGSGGGGSGGGGSDIQMT |
| | | | QSPSSLSASVGDRVTITCKASQNVDTNVAWYQQKPGQAPKSLIYSAS |
| | | | YRYSDVPSRFSGSASGTDFTLTISSLQSEDFATYYCQQYDSYPYTFG |
| | | | CGTKLEIKSGGGGSEVQLVESGGGLVQPGGSLKLSCAASGFTFNKYA |
| | | | MNWVRQAPGKGLEWVARIRSKYNNYATYYADSVKDRFTISRDDSKNT |
| | | | AYLQMNNLKTEDTAVYYCVRHGNFGNSYISYWAYWGQGTLVTVSSGG |
| | | | GGSGGGGSGGGGSQTVVTQEPSLTVSPGGTVTLTCGSSTGAVTSGNY |
| | | | PNWVQQKPGQAPRGLIGGTKFLAPGTPARFSGSLLGGKAALTLSGVQ |
| | | | PEDEAEYYCVLWYSNRWVFGGGTKLTVLGGGGDKTHTCPPCPAPELL |
| | | | GGPSVFLFPPKPKDTLMISRTPEVTCVVVDVSHEDPEVKFNWYVDGV |
| | | | EVHNAKTKPCEEQYGSTYRCVSVLTVLHQDWLNGKEYKCKVSNKALP |
| | | | APIEKTISKAKGQPREPQVYTLPPSREEMTKNQVSLTCLVKGFYPSD |
| | | | IAVEWESNGQPENNYKTTPPVLDSDGSFFLYSKLTVDKSRWQQGNVF |
| | | | SCSVMHEALHNHYTQKSLSLSPGGGGSGGGGSGGGGSGGGGSGGGGS |
| | | | GGGGSDKTHTCPPCPAPELLGGPSVFLFPPKPKDTLMISRTPEVTCV |
| | | | VVDVSHEDPEVKFNWYVDGVEVHNAKTKPCEEQYGSTYRCVSVLTVL |
| | | | HQDWLNGKEYKCKVSNKALPAPIEKTISKAKGQPREPQVYTLPPSRE |
| | | | EMTKNQVSLTCLVKGFYPSDIAVEWESNGQPENNYKTTPPVLDSDGS |
| | | | FFLYSKLTVDKSRWQQGNVFSCSVMHEALHNHYTQKSLSLSPGK |
| 60. | PM_2xCD3- | VH CDR1 | DYYMY |
| | scFc | | |
| 61. | PM_2xCD3- | VH CDR2 | IISDAGGLTYYSDIIKG |
| | scFc | | |
| 62. | PM_2xCD3- | VH CDR3 | GFPLLRHGAMDY |
| | scFc | | |
| 63. | PM_2xCD3- | VL CDR1 | KASQNVDTNVA |
| | scFc | | |
| 64. | PM_2xCD3- | VL CDR2 | SASYRYS |
| | ScFc | | |
| 65. | PM_2xCD3- | VL CDR3 | QQYDSYPYT |
| | ScFc | | |
| 66. | PM_2xCD3- | VH | QVQLVESGGGLVKPGESLRLSCAASGFTFSDYYMYWVRQAPGKGLEW |
| | scFc | | VAIISDAGGLTYYSDIIKGRFTISRDNAKNSLYLQINSLKAEDTAVY |
| | | | YCARGFPLLRHGAMDYWGQGTLVTVSS |
| 67. | PM_2xCD3- | VL | DIQMTQSPSSLSASVGDRVTITCKASQNVDTNVAWYQQKPGQAPKSL |
| | scFc | | IYSASYRYSDVPSRFSGSASGTDFTLTISSVQSEDFATYYCQQYDSY |
| | | | PYTFGGGTKLEIK |
| 68. | PM_2xCD3- | scFv | QVQLVESGGGLVKPGESLRLSCAASGFTFSDYYMYWVRQAPGKGLEW |
| | scFc | | VAIISDAGGLTYYSDIIKGRFTISRDNAKNSLYLQINSLKAEDTAVY |
| | | | YCARGFPLLRHGAMDYWGQGTLVTVSSGGGGSGGGGSGGGGSDIQMT |
| | | | QSPSSLSASVGDRVTITCKASQNVDTNVAWYQQKPGQAPKSLIYSAS |
| | | | YRYSDVPSRFSGSASGTDFTLTISSVQSEDFATYYCQQYDSYPYTFG |
| | | | GGTKLEIK |
| 69. | PM_2xCD3- | bispecific | QVQLVESGGGLVKPGESLRLSCAASGFTFSDYYMYWVRQAPGKGLEW |
| | scFc | molecule | VAIISDAGGLTYYSDIIKGRFTISRDNAKNSLYLQINSLKAEDTAVY |
| | | | YCARGFPLLRHGAMDYWGQGTLVTVSSGGGGSGGGGSGGGGSDIQMT |
| | | | QSPSSLSASVGDRVTITCKASQNVDTNVAWYQQKPGQAPKSLIYSAS |
| | | | YRYSDVPSRFSGSASGTDFTLTISSVQSEDFATYYCQQYDSYPYTFG |
| | | | GGTKLEIKSGGGGSEVQLVESGGGLVQPGGSLKLSCAASGFTFNKYA |
| | | | MNWVRQAPGKGLEWVARIRSKYNNYATYYADSVKDRFTISRDDSKNT |
| | | | AYLQMNNLKTEDTAVYYCVRHGNFGNSYISYWAYWGQGTLVTVSSGG |
| | | | GGSGGGGSGGGGSQTVVTQEPSLTVSPGGTVTLTCGSSTGAVTSGNY |
| | | | PNWVQQKPGQAPRGLIGGTKFLAPGTPARFSGSLLGGKAALTLSGVQ |
| | | | PEDEAEYYCVLWYSNRWVFGGGTKLTVL |
| 70. | PM_2xCD3- | bispecific | QVQLVESGGGLVKPGESLRLSCAASGFTFSDYYMYWVRQAPGKGLEW |
| | scFc | HLE | VAIISDAGGLTYYSDIIKGRFTISRDNAKNSLYLQINSLKAEDTAVY |
| | | molecule | YCARGFPLLRHGAMDYWGQGTLVTVSSGGGGSGGGGSGGGGSDIQMT |
| | | | QSPSSLSASVGDRVTITCKASQNVDTNVAWYQQKPGQAPKSLIYSAS |
| | | | YRYSDVPSRFSGSASGTDFTLTISSVQSEDFATYYCQQYDSYPYTFG |
| | | | GGTKLEIKSGGGGSEVQLVESGGGLVQPGGSLKLSCAASGFTFNKYA |
| | | | MNWVRQAPGKGLEWVARIRSKYNNYATYYADSVKDRFTISRDDSKNT |
| | | | AYLQMNNLKTEDTAVYYCVRHGNFGNSYISYWAYWGQGTLVTVSSGG |
| | | | GGSGGGGSGGGGSQTVVTQEPSLTVSPGGTVTLTCGSSTGAVTSGNY |
| | | | PNWVQQKPGQAPRGLIGGTKFLAPGTPARFSGSLLGGKAALTLSGVQ |
| | | | PEDEAEYYCVLWYSNRWVFGGGTKLTVLGGGGDKTHTCPPCPAPELL |
| | | | GGPSVFLFPPKPKDTLMISRTPEVTCVVVDVSHEDPEVKFNWYVDGV |
| | | | EVHNAKTKPCEEQYGSTYRCVSVLTVLHQDWLNGKEYKCKVSNKALP |
| | | | APIEKTISKAKGQPREPQVYTLPPSREEMTKNQVSLTCLVKGFYPSD |
| | | | IAVEWESNGQPENNYKTTPPVLDSDGSFFLYSKLTVDKSRWQQGNVF |
| | | | SCSVMHEALHNHYTQKSLSLSPGKGGGGSGGGGSGGGGSGGGGSGGG |
| | | | GSGGGGSDKTHTCPPCPAPELLGGPSVFLFPPKPKDTLMISRTPEVT |
| | | | CVVVDVSHEDPEVKFNWYVDGVEVHNAKTKPCEEQYGSTYRCVSVLT |
| | | | VLHQDWLNGKEYKCKVSNKALPAPIEKTISKAKGQPREPQVYTLPPS |
| | | | REEMTKNQVSLTCLVKGFYPSDIAVEWESNGQPENNYKTTPPVLDSD |
| | | | GSFFLYSKLTVDKSRWQQGNVFSCSVMHEALHNHYTQKSLSLSPGK |
| 71. | PM_2xCD3- | bispecific | QVQLVESGGGLVKPGESLRLSCAASGFTFSDYYMYWVRQAPGKGLEW |
| | scFcdeIGK | HLE | VAIISDAGGLTYYSDIIKGRFTISRDNAKNSLYLQINSLKAEDTAVY |
| | | molecule | YCARGFPLLRHGAMDYWGQGTLVTVSSGGGGSGGGGSGGGGSDIQMT |
| | | | QSPSSLSASVGDRVTITCKASQNVDTNVAWYQQKPGQAPKSLIYSAS |
| | | | YRYSDVPSRFSGSASGTDFTLTISSVQSEDFATYYCQQYDSYPYTFG |
| | | | GGTKLEIKSGGGGSEVQLVESGGGLVQPGGSLKLSCAASGFTFNKYA |
| | | | MNWVRQAPGKGLEWVARIRSKYNNYATYYADSVKDRFTISRDDSKNT |
| | | | AYLQMNNLKTEDTAVYYCVRHGNFGNSYISYWAYWGQGTLVTVSSGG |
| | | | GGSGGGGSGGGGSQTVVTQEPSLTVSPGGTVTLTCGSSTGAVTSGNY |
| | | | PNWVQQKPGQAPRGLIGGTKFLAPGTPARFSGSLLGGKAALTLSGVQ |
| | | | PEDEAEYYCVLWYSNRWVFGGGTKLTVLGGGGDKTHTCPPCPAPELL |
| | | | GGPSVFLFPPKPKDTLMISRTPEVTCVVVDVSHEDPEVKFNWYVDGV |
| | | | EVHNAKTKPCEEQYGSTYRCVSVLTVLHQDWLNGKEYKCKVSNKALP |
| | | | APIEKTISKAKGQPREPQVYTLPPSREEMTKNQVSLTCLVKGFYPSD |
| | | | IAVEWESNGQPENNYKTTPPVLDSDGSFFLYSKLTVDKSRWQQGNVF |
| | | | SCSVMHEALHNHYTQKSLSLSPGGGGSGGGGSGGGGSGGGGSGGGGS |
| | | | GGGGSDKTHTCPPCPAPELLGGPSVFLFPPKPKDTLMISRTPEVTCV |
| | | | VVDVSHEDPEVKFNWYVDGVEVHNAKTKPCEEQYGSTYRCVSVLTVL |
| | | | HQDWLNGKEYKCKVSNKALPAPIEKTISKAKGQPREPQVYTLPPSRE |
| | | | EMTKNQVSLTCLVKGFYPSDIAVEWESNGQPENNYKTTPPVLDSDGS |
| | | | FFLYSKLTVDKSRWQQGNVFSCSVMHEALHNHYTQKSLSLSPGK |
| 72. | PM_2_CCxCD3- | VH | QVQLVESGGGLVKPGESLRLSCAASGFTFSDYYMYWVRQAPGKCLEW |
| | scFc | | VAIISDAGGLTYYSDIIKGRFTISRDNAKNSLYLQINSLKAEDTAVY |
| | | | YCARGFPLLRHGAMDYWGQGTLVTVSS |
| 73. | PM_2_CCxCD3- | VL | DIQMTQSPSSLSASVGDRVTITCKASQNVDTNVAWYQQKPGQAPKSL |
| | scFc | | IYSASYRYSDVPSRFSGSASGTDFTLTISSVQSEDFATYYCQQYDSY |
| | | | PYTFGCGTKLEIK |
| 74. | PM_2_CCxCD3- | scFv | QVQLVESGGGLVKPGESLRLSCAASGFTFSDYYMYWVRQAPGKCLEW |
| | scFc | | VAIISDAGGLTYYSDIIKGRFTISRDNAKNSLYLQINSLKAEDTAVY |
| | | | YCARGFPLLRHGAMDYWGQGTLVTVSSGGGGSGGGGSGGGGSDIQMT |
| | | | QSPSSLSASVGDRVTITCKASQNVDTNVAWYQQKPGQAPKSLIYSAS |
| | | | YRYSDVPSRFSGSASGTDFTLTISSVQSEDFATYYCQQYDSYPYTFG |
| | | | CGTKLEIK |
| 75. | PM_2_CCxCD3- | bispecific | QVQLVESGGGLVKPGESLRLSCAASGFTFSDYYMYWVRQAPGKCLEW |
| | scFc | molecule | VAIISDAGGLTYYSDIIKGRFTISRDNAKNSLYLQINSLKAEDTAVY |
| | | | YCARGFPLLRHGAMDYWGQGTLVTVSSGGGGSGGGGSGGGGSDIQMT |
| | | | QSPSSLSASVGDRVTITCKASQNVDTNVAWYQQKPGQAPKSLIYSAS |
| | | | YRYSDVPSRFSGSASGTDFTLTISSVQSEDFATYYCQQYDSYPYTFG |
| | | | CGTKLEIKSGGGGSEVQLVESGGGLVQPGGSLKLSCAASGFTFNKYA |
| | | | MNWVRQAPGKGLEWVARIRSKYNNYATYYADSVKDRFTISRDDSKNT |
| | | | AYLQMNNLKTEDTAVYYCVRHGNFGNSYISYWAYWGQGTLVTVSSGG |
| | | | GGSGGGGSGGGGSQTVVTQEPSLTVSPGGTVTLTCGSSTGAVTSGNY |
| | | | PNWVQQKPGQAPRGLIGGTKFLAPGTPARFSGSLLGGKAALTLSGVQ |
| | | | PEDEAEYYCVLWYSNRWVFGGGTKLTVL |
| 76. | PM_2_CCxCD3- | bispecific | QVQLVESGGGLVKPGESLRLSCAASGFTFSDYYMYWVRQAPGKCLEW |
| | scFc | HLE | VAIISDAGGLTYYSDIIKGRFTISRDNAKNSLYLQINSLKAEDTAVY |
| | | molecule | YCARGFPLLRHGAMDYWGQGTLVTVSSGGGGSGGGGSGGGGSDIQMT |
| | | | QSPSSLSASVGDRVTITCKASQNVDTNVAWYQQKPGQAPKSLIYSAS |
| | | | YRYSDVPSRFSGSASGTDFTLTISSVQSEDFATYYCQQYDSYPYTFG |
| | | | CGTKLEIKSGGGGSEVQLVESGGGLVQPGGSLKLSCAASGFTFNKYA |
| | | | MNWVRQAPGKGLEWVARIRSKYNNYATYYADSVKDRFTISRDDSKNT |
| | | | AYLQMNNLKTEDTAVYYCVRHGNFGNSYISYWAYWGQGTLVTVSSGG |
| | | | GGSGGGGSGGGGSQTVVTQEPSLTVSPGGTVTLTCGSSTGAVTSGNY |
| | | | PNWVQQKPGQAPRGLIGGTKFLAPGTPARFSGSLLGGKAALTLSGVQ |
| | | | PEDEAEYYCVLWYSNRWVFGGGTKLTVLGGGGDKTHTCPPCPAPELL |
| | | | GGPSVFLFPPKPKDTLMISRTPEVTCVVVDVSHEDPEVKFNWYVDGV |
| | | | EVHNAKTKPCEEQYGSTYRCVSVLTVLHQDWLNGKEYKCKVSNKALP |
| | | | APIEKTISKAKGQPREPQVYTLPPSREEMTKNQVSLTCLVKGFYPSD |
| | | | IAVEWESNGQPENNYKTTPPVLDSDGSFFLYSKLTVDKSRWQQGNVF |
| | | | SCSVMHEALHNHYTQKSLSLSPGKGGGGSGGGGSGGGGSGGGGSGGG |
| | | | GSGGGGSDKTHTCPPCPAPELLGGPSVFLFPPKPKDTLMISRTPEVT |
| | | | CVVVDVSHEDPEVKFNWYVDGVEVHNAKTKPCEEQYGSTYRCVSVLT |
| | | | VLHQDWLNGKEYKCKVSNKALPAPIEKTISKAKGQPREPQVYTLPPS |
| | | | REEMTKNQVSLTCLVKGFYPSDIAVEWESNGQPENNYKTTPPVLDSD |
| | | | GSFFLYSKLTVDKSRWQQGNVFSCSVMHEALHNHYTQKSLSLSPGK |
| 77. | PM_2_CCxCD3- | bispecific | QVQLVESGGGLVKPGESLRLSCAASGFTFSDYYMYWVRQAPGKCLEW |
| | scFc_delGK | HLE | VAIISDAGGLTYYSDIIKGRFTISRDNAKNSLYLQINSLKAEDTAVY |
| | | molecule | YCARGFPLLRHGAMDYWGQGTLVTVSSGGGGSGGGGSGGGGSDIQMT |
| | | | QSPSSLSASVGDRVTITCKASQNVDTNVAWYQQKPGQAPKSLIYSAS |
| | | | YRYSDVPSRFSGSASGTDFTLTISSVQSEDFATYYCQQYDSYPYTFG |
| | | | CGTKLEIKSGGGGSEVQLVESGGGLVQPGGSLKLSCAASGFTFNKYA |
| | | | MNWVRQAPGKGLEWVARIRSKYNNYATYYADSVKDRFTISRDDSKNT |
| | | | AYLQMNNLKTEDTAVYYCVRHGNFGNSYISYWAYWGQGTLVTVSSGG |
| | | | GGSGGGGSGGGGSQTVVTQEPSLTVSPGGTVTLTCGSSTGAVTSGNY |
| | | | PNWVQQKPGQAPRGLIGGTKFLAPGTPARFSGSLLGGKAALTLSGVQ |
| | | | PEDEAEYYCVLWYSNRWVFGGGTKLTVLGGGGDKTHTCPPCPAPELL |
| | | | GGPSVFLFPPKPKDTLMISRTPEVTCVVVDVSHEDPEVKFNWYVDGV |
| | | | EVHNAKTKPCEEQYGSTYRCVSVLTVLHQDWLNGKEYKCKVSNKALP |
| | | | APIEKTISKAKGQPREPQVYTLPPSREEMTKNQVSLTCLVKGFYPSD |
| | | | IAVEWESNGQPENNYKTTPPVLDSDGSFFLYSKLTVDKSRWQQGNVF |
| | | | SCSVMHEALHNHYTQKSLSLSPGGGGSGGGGSGGGGSGGGGSGGGGS |
| | | | GGGGSDKTHTCPPCPAPELLGGPSVFLFPPKPKDTLMISRTPEVTCV |
| | | | VVDVSHEDPEVKFNWYVDGVEVHNAKTKPCEEQYGSTYRCVSVLTVL |
| | | | HQDWLNGKEYKCKVSNKALPAPIEKTISKAKGQPREPQVYTLPPSRE |
| | | | EMTKNQVSLTCLVKGFYPSDIAVEWESNGQPENNYKTTPPVLDSDGS |
| | | | FFLYSKLTVDKSRWQQGNVFSCSVMHEALHNHYTQKSLSLSPGK |
| 78. | PM_3xCD3- | VH CDR1 | DYYMY |
| | ScFc | | |
| 79. | PM_3xCD3- | VH CDR2 | IISDAGGLTYYSDIIKG |
| | scFc | | |
| 80. | PM_3xCD3- | VH CDR3 | GFPLLRHGAMDY |
| | scFc | | |
| 81. | PM_3xCD3- | VL CDR1 | KASQNVDTNVA |
| | scFc | | |
| 82. | PM_3xCD3- | VL CDR2 | SASYRYS |
| | ScFc | | |
| 83. | PM_3xCD3- | VL CDR3 | QQYDDLRPT |
| | ScFc | | |
| 84. | PM_3xCD3- | VH | QVQLVESGGGLVKPGESLRLSCAASGFTFSDYYMYWVRQAPGKGLEW |
| | scFc | | VAIISDAGGLTYYSDIIKGRFTISRDNAKNSLYLQINSLKAEDTAVY |
| | | | YCARGFPLLRHGAMDYWGQGTLVTVSS |
| 85. | PM_3xCD3- | VL | DIQMTQSPSSLSASVGDRVTITCKASQNVDTNVAWYQQKPGQAPKSL |
| | scFc | | IYSASYRYSDVPSRFSGSASGTDFTLTISSLQSEDFATYYCQQYDDL |
| | | | RPTFGGGTKLEIK |
| 86. | PM_3xCD3- | scFv | QVQLVESGGGLVKPGESLRLSCAASGFTFSDYYMYWVRQAPGKGLEW |
| | scFc | | VAIISDAGGLTYYSDIIKGRFTISRDNAKNSLYLQINSLKAEDTAVY |
| | | | YCARGFPLLRHGAMDYWGQGTLVTVSSGGGGSGGGGSGGGGSDIQMT |
| | | | QSPSSLSASVGDRVTITCKASQNVDTNVAWYQQKPGQAPKSLIYSAS |
| | | | YRYSDVPSRFSGSASGTDFTLTISSLQSEDFATYYCQQYDDLRPTFG |
| | | | GGTKLEIK |
| 87. | PM_3xCD3- | bispecific | QVQLVESGGGLVKPGESLRLSCAASGFTFSDYYMYWVRQAPGKGLEW |
| | scFc | molecule | VAIISDAGGLTYYSDIIKGRFTISRDNAKNSLYLQINSLKAEDTAVY |
| | | | YCARGFPLLRHGAMDYWGQGTLVTVSSGGGGSGGGGSGGGGSDIQMT |
| | | | QSPSSLSASVGDRVTITCKASQNVDTNVAWYQQKPGQAPKSLIYSAS |
| | | | YRYSDVPSRFSGSASGTDFTLTISSLQSEDFATYYCQQYDDLRPTFG |
| | | | GGTKLEIKSGGGGSEVQLVESGGGLVQPGGSLKLSCAASGFTFNKYA |
| | | | MNWVRQAPGKGLEWVARIRSKYNNYATYYADSVKDRFTISRDDSKNT |
| | | | AYLQMNNLKTEDTAVYYCVRHGNFGNSYISYWAYWGQGTLVTVSSGG |
| | | | GGSGGGGSGGGGSQTVVTQEPSLTVSPGGTVTLTCGSSTGAVTSGNY |
| | | | PNWVQQKPGQAPRGLIGGTKFLAPGTPARFSGSLLGGKAALTLSGVQ |
| | | | PEDEAEYYCVLWYSNRWVFGGGTKLTVL |
| 88. | PM_3xCD3- | bispecific | QVQLVESGGGLVKPGESLRLSCAASGFTFSDYYMYWVRQAPGKGLEW |
| | scFc | HLE | VAIISDAGGLTYYSDIIKGRFTISRDNAKNSLYLQINSLKAEDTAVY |
| | | molecule | YCARGFPLLRHGAMDYWGQGTLVTVSSGGGGSGGGGSGGGGSDIQMT |
| | | | QSPSSLSASVGDRVTITCKASQNVDTNVAWYQQKPGQAPKSLIYSAS |
| | | | YRYSDVPSRFSGSASGTDFTLTISSLQSEDFATYYCQQYDDLRPTFG |
| | | | GGTKLEIKSGGGGSEVQLVESGGGLVQPGGSLKLSCAASGFTFNKYA |
| | | | MNWVRQAPGKGLEWVARIRSKYNNYATYYADSVKDRFTISRDDSKNT |
| | | | AYLQMNNLKTEDTAVYYCVRHGNFGNSYISYWAYWGQGTLVTVSSGG |
| | | | GGSGGGGSGGGGSQTVVTQEPSLTVSPGGTVTLTCGSSTGAVTSGNY |
| | | | PNWVQQKPGQAPRGLIGGTKFLAPGTPARFSGSLLGGKAALTLSGVQ |
| | | | PEDEAEYYCVLWYSNRWVFGGGTKLTVLGGGGDKTHTCPPCPAPELL |
| | | | GGPSVFLFPPKPKDTLMISRTPEVTCVVVDVSHEDPEVKFNWYVDGV |
| | | | EVHNAKTKPCEEQYGSTYRCVSVLTVLHQDWLNGKEYKCKVSNKALP |
| | | | APIEKTISKAKGQPREPQVYTLPPSREEMTKNQVSLTCLVKGFYPSD |
| | | | IAVEWESNGQPENNYKTTPPVLDSDGSFFLYSKLTVDKSRWQQGNVF |
| | | | SCSVMHEALHNHYTQKSLSLSPGKGGGGSGGGGSGGGGSGGGGSGGG |
| | | | GSGGGGSDKTHTCPPCPAPELLGGPSVFLFPPKPKDTLMISRTPEVT |
| | | | CVVVDVSHEDPEVKFNWYVDGVEVHNAKTKPCEEQYGSTYRCVSVLT |
| | | | VLHQDWLNGKEYKCKVSNKALPAPIEKTISKAKGQPREPQVYTLPPS |
| | | | REEMTKNQVSLTCLVKGFYPSDIAVEWESNGQPENNYKTTPPVLDSD |
| | | | GSFFLYSKLTVDKSRWQQGNVFSCSVMHEALHNHYTQKSLSLSPGK |
| 89. | PM_3xCD3- | bispecific | QVQLVESGGGLVKPGESLRLSCAASGFTFSDYYMYWVRQAPGKGLEW |
| | scFc_delGK | HLE | VAIISDAGGLTYYSDIIKGRFTISRDNAKNSLYLQINSLKAEDTAVY |
| | | molecule | YCARGFPLLRHGAMDYWGQGTLVTVSSGGGGSGGGGSGGGGSDIQMT |
| | | | QSPSSLSASVGDRVTITCKASQNVDTNVAWYQQKPGQAPKSLIYSAS |
| | | | YRYSDVPSRFSGSASGTDFTLTISSLQSEDFATYYCQQYDDLRPTFG |
| | | | GGTKLEIKSGGGGSEVQLVESGGGLVQPGGSLKLSCAASGFTFNKYA |
| | | | MNWVRQAPGKGLEWVARIRSKYNNYATYYADSVKDRFTISRDDSKNT |
| | | | AYLQMNNLKTEDTAVYYCVRHGNFGNSYISYWAYWGQGTLVTVSSGG |
| | | | GGSGGGGSGGGGSQTVVTQEPSLTVSPGGTVTLTCGSSTGAVTSGNY |
| | | | PNWVQQKPGQAPRGLIGGTKFLAPGTPARFSGSLLGGKAALTLSGVQ |
| | | | PEDEAEYYCVLWYSNRWVFGGGTKLTVLGGGGDKTHTCPPCPAPELL |
| | | | GGPSVFLFPPKPKDTLMISRTPEVTCVVVDVSHEDPEVKFNWYVDGV |
| | | | EVHNAKTKPCEEQYGSTYRCVSVLTVLHQDWLNGKEYKCKVSNKALP |
| | | | APIEKTISKAKGQPREPQVYTLPPSREEMTKNQVSLTCLVKGFYPSD |
| | | | IAVEWESNGQPENNYKTTPPVLDSDGSFFLYSKLTVDKSRWQQGNVF |
| | | | SCSVMHEALHNHYTQKSLSLSPGGGGSGGGGSGGGGSGGGGSGGGGS |
| | | | GGGGSDKTHTCPPCPAPELLGGPSVFLFPPKPKDTLMISRTPEVTCV |
| | | | VVDVSHEDPEVKFNWYVDGVEVHNAKTKPCEEQYGSTYRCVSVLTVL |
| | | | HQDWLNGKEYKCKVSNKALPAPIEKTISKAKGQPREPQVYTLPPSRE |
| | | | EMTKNQVSLTCLVKGFYPSDIAVEWESNGQPENNYKTTPPVLDSDGS |
| | | | FFLYSKLTVDKSRWQQGNVFSCSVMHEALHNHYTQKSLSLSPGK |
| 90. | PM_3_CCxCD3- | VH | QVQLVESGGGLVKPGESLRLSCAASGFTFSDYYMYWVRQAPGKCLEW |
| | scFc | | VAIISDAGGLTYYSDIIKGRFTISRDNAKNSLYLQINSLKAEDTAVY |
| | | | YCARGFPLLRHGAMDYWGQGTLVTVSS |
| 91. | PM_3_CCxCD3- | VL | DIQMTQSPSSLSASVGDRVTITCKASQNVDTNVAWYQQKPGQAPKSL |
| | scFc | | IYSASYRYSDVPSRFSGSASGTDFTLTISSLQSEDFATYYCQQYDDL |
| | | | RPTFGCGTKLEIK |
| 92. | PM_3_CCxCD3- | scFv | QVQLVESGGGLVKPGESLRLSCAASGFTFSDYYMYWVRQAPGKCLEW |
| | scFc | | VAIISDAGGLTYYSDIIKGRFTISRDNAKNSLYLQINSLKAEDTAVY |
| | | | YCARGFPLLRHGAMDYWGQGTLVTVSSGGGGSGGGGSGGGGSDIQMT |
| | | | QSPSSLSASVGDRVTITCKASQNVDTNVAWYQQKPGQAPKSLIYSAS |
| | | | YRYSDVPSRFSGSASGTDFTLTISSLQSEDFATYYCQQYDDLRPTFG |
| | | | CGTKLEIK |
| 93. | PM_3_CCxCD3- | bispecific | QVQLVESGGGLVKPGESLRLSCAASGFTFSDYYMYWVRQAPGKCLEW |
| | scFc | molecule | VAIISDAGGLTYYSDIIKGRFTISRDNAKNSLYLQINSLKAEDTAVY |
| | | | YCARGFPLLRHGAMDYWGQGTLVTVSSGGGGSGGGGSGGGGSDIQMT |
| | | | QSPSSLSASVGDRVTITCKASQNVDTNVAWYQQKPGQAPKSLIYSAS |
| | | | YRYSDVPSRFSGSASGTDFTLTISSLQSEDFATYYCQQYDDLRPTFG |
| | | | CGTKLEIKSGGGGSEVQLVESGGGLVQPGGSLKLSCAASGFTFNKYA |
| | | | MNWVRQAPGKGLEWVARIRSKYNNYATYYADSVKDRFTISRDDSKNT |
| | | | AYLQMNNLKTEDTAVYYCVRHGNFGNSYISYWAYWGQGTLVTVSSGG |
| | | | GGSGGGGSGGGGSQTVVTQEPSLTVSPGGTVTLTCGSSTGAVTSGNY |
| | | | PNWVQQKPGQAPRGLIGGTKFLAPGTPARFSGSLLGGKAALTLSGVQ |
| | | | PEDEAEYYCVLWYSNRWVFGGGTKLTVL |
| 94. | PM_3_CCxCD3- | bispecific | QVQLVESGGGLVKPGESLRLSCAASGFTFSDYYMYWVRQAPGKCLEW |
| | scFc | HLE | VAIISDAGGLTYYSDIIKGRFTISRDNAKNSLYLQINSLKAEDTAVY |
| | | molecule | YCARGFPLLRHGAMDYWGQGTLVTVSSGGGGSGGGGSGGGGSDIQMT |
| | | | QSPSSLSASVGDRVTITCKASQNVDTNVAWYQQKPGQAPKSLIYSAS |
| | | | YRYSDVPSRFSGSASGTDFTLTISSLQSEDFATYYCQQYDDLRPTFG |
| | | | CGTKLEIKSGGGGSEVQLVESGGGLVQPGGSLKLSCAASGFTFNKYA |
| | | | MNWVRQAPGKGLEWVARIRSKYNNYATYYADSVKDRFTISRDDSKNT |
| | | | AYLQMNNLKTEDTAVYYCVRHGNFGNSYISYWAYWGQGTLVTVSSGG |
| | | | GGSGGGGSGGGGSQTVVTQEPSLTVSPGGTVTLTCGSSTGAVTSGNY |
| | | | PNWVQQKPGQAPRGLIGGTKFLAPGTPARFSGSLLGGKAALTLSGVQ |
| | | | PEDEAEYYCVLWYSNRWVFGGGTKLTVLGGGGDKTHTCPPCPAPELL |
| | | | GGPSVFLFPPKPKDTLMISRTPEVTCVVVDVSHEDPEVKFNWYVDGV |
| | | | EVHNAKTKPCEEQYGSTYRCVSVLTVLHQDWLNGKEYKCKVSNKALP |
| | | | APIEKTISKAKGQPREPQVYTLPPSREEMTKNQVSLTCLVKGFYPSD |
| | | | IAVEWESNGQPENNYKTTPPVLDSDGSFFLYSKLTVDKSRWQQGNVF |
| | | | SCSVMHEALHNHYTQKSLSLSPGKGGGGSGGGGSGGGGSGGGGSGGG |
| | | | GSGGGGSDKTHTCPPCPAPELLGGPSVFLFPPKPKDTLMISRTPEVT |
| | | | CVVVDVSHEDPEVKFNWYVDGVEVHNAKTKPCEEQYGSTYRCVSVLT |
| | | | VLHQDWLNGKEYKCKVSNKALPAPIEKTISKAKGQPREPQVYTLPPS |
| | | | REEMTKNQVSLTCLVKGFYPSDIAVEWESNGQPENNYKTTPPVLDSD |
| | | | GSFFLYSKLTVDKSRWQQGNVFSCSVMHEALHNHYTQKSLSLSPGK |
| 95. | PM_3_CCxCD3- | bispecific | QVQLVESGGGLVKPGESLRLSCAASGFTFSDYYMYWVRQAPGKCLEW |
| | scFc_delGK | HLE | VAIISDAGGLTYYSDIIKGRFTISRDNAKNSLYLQINSLKAEDTAVY |
| | | molecule | YCARGFPLLRHGAMDYWGQGTLVTVSSGGGGSGGGGSGGGGSDIQMT |
| | | | QSPSSLSASVGDRVTITCKASQNVDTNVAWYQQKPGQAPKSLIYSAS |
| | | | YRYSDVPSRFSGSASGTDFTLTISSLQSEDFATYYCQQYDDLRPTFG |
| | | | CGTKLEIKSGGGGSEVQLVESGGGLVQPGGSLKLSCAASGFTFNKYA |
| | | | MNWVRQAPGKGLEWVARIRSKYNNYATYYADSVKDRFTISRDDSKNT |
| | | | AYLQMNNLKTEDTAVYYCVRHGNFGNSYISYWAYWGQGTLVTVSSGG |
| | | | GGSGGGGSGGGGSQTVVTQEPSLTVSPGGTVTLTCGSSTGAVTSGNY |
| | | | PNWVQQKPGQAPRGLIGGTKFLAPGTPARFSGSLLGGKAALTLSGVQ |
| | | | PEDEAEYYCVLWYSNRWVFGGGTKLTVLGGGGDKTHTCPPCPAPELL |
| | | | GGPSVFLFPPKPKDTLMISRTPEVTCVVVDVSHEDPEVKFNWYVDGV |
| | | | EVHNAKTKPCEEQYGSTYRCVSVLTVLHQDWLNGKEYKCKVSNKALP |
| | | | APIEKTISKAKGQPREPQVYTLPPSREEMTKNQVSLTCLVKGFYPSD |
| | | | IAVEWESNGQPENNYKTTPPVLDSDGSFFLYSKLTVDKSRWQQGNVF |
| | | | SCSVMHEALHNHYTQKSLSLSPGGGGSGGGGSGGGGSGGGGSGGGGS |
| | | | GGGGSDKTHTCPPCPAPELLGGPSVFLFPPKPKDTLMISRTPEVTCV |
| | | | VVDVSHEDPEVKFNWYVDGVEVHNAKTKPCEEQYGSTYRCVSVLTVL |
| | | | HQDWLNGKEYKCKVSNKALPAPIEKTISKAKGQPREPQVYTLPPSRE |
| | | | EMTKNQVSLTCLVKGFYPSDIAVEWESNGQPENNYKTTPPVLDSDGS |
| | | | FFLYSKLTVDKSRWQQGNVFSCSVMHEALHNHYTQKSLSLSPGK |
| 96. | PM_4xCD3- | VH CDR1 | DYYMY |
| | scFc | | |
| 97. | PM_4xCD3- | VH CDR2 | IISDHYSHTYYSDIIKD |
| | scFc | | |
| 98. | PM_4xCD3- | VH CDR3 | GFPLLRHGAMDY |
| | scFc | | |
| 99. | PM_4xCD3- | VL CDR1 | KASQNVDTNVA |
| | scFc | | |
| 100. | PM_4xCD3- | VL CDR2 | SASYRYS |
| | scFc | | |
| 101. | PM_4xCD3- | VL CDR3 | QQYDSYPYT |
| | scFc | | |
| 102. | PM_4xCD3- | VH | QVQLVESGGGLVKPGESLRLSCAASGFTFSDYYMYWVRQAPGKGLEW |
| | scFc | | VAIISDHYSHTYYSDIIKDRFTISRDNAKNSLYLQMNSLKAEDTAVY |
| | | | YCARGFPLLRHGAMDYWGQGTLVTVSS |
| 103. | PM_4xCD3- | VL | DIQMTQSPSSLSASVGDRVTITCKASQNVDTNVAWYQQKPGQAPKSL |
| | scFc | | IYSASYRYSDVPSRFSGSASGTDFTLTISSVQSEDFATYYCQQYDSY |
| | | | PYTFGGGTKLEIK |
| 104. | PM_4xCD3- | scFv | QVQLVESGGGLVKPGESLRLSCAASGFTFSDYYMYWVRQAPGKGLEW |
| | scFc | | VAIISDHYSHTYYSDIIKDRFTISRDNAKNSLYLQMNSLKAEDTAVY |
| | | | YCARGFPLLRHGAMDYWGQGTLVTVSSGGGGSGGGGSGGGGSDIQMT |
| | | | QSPSSLSASVGDRVTITCKASQNVDTNVAWYQQKPGQAPKSLIYSAS |
| | | | YRYSDVPSRFSGSASGTDFTLTISSVQSEDFATYYCQQYDSYPYTFG |
| | | | GGTKLEIK |
| 105. | PM_4xCD3- | bispecific | QVQLVESGGGLVKPGESLRLSCAASGFTFSDYYMYWVRQAPGKGLEW |
| | scFc | molecule | VAIISDHYSHTYYSDIIKDRFTISRDNAKNSLYLQMNSLKAEDTAVY |
| | | | YCARGFPLLRHGAMDYWGQGTLVTVSSGGGGSGGGGSGGGGSDIQMT |
| | | | QSPSSLSASVGDRVTITCKASQNVDTNVAWYQQKPGQAPKSLIYSAS |
| | | | YRYSDVPSRFSGSASGTDFTLTISSVQSEDFATYYCQQYDSYPYTFG |
| | | | GGTKLEIKSGGGGSEVQLVESGGGLVQPGGSLKLSCAASGFTFNKYA |
| | | | MNWVRQAPGKGLEWVARIRSKYNNYATYYADSVKDRFTISRDDSKNT |
| | | | AYLQMNNLKTEDTAVYYCVRHGNFGNSYISYWAYWGQGTLVTVSSGG |
| | | | GGSGGGGSGGGGSQTVVTQEPSLTVSPGGTVTLTCGSSTGAVTSGNY |
| | | | PNWVQQKPGQAPRGLIGGTKFLAPGTPARFSGSLLGGKAALTLSGVQ |
| | | | PEDEAEYYCVLWYSNRWVFGGGTKLTVL |
| 106. | PM_4xCD3- | bispecific | QVQLVESGGGLVKPGESLRLSCAASGFTFSDYYMYWVRQAPGKGLEW |
| | scFc | HLE | VAIISDHYSHTYYSDIIKDRFTISRDNAKNSLYLQMNSLKAEDTAVY |
| | | molecule | YCARGFPLLRHGAMDYWGQGTLVTVSSGGGGSGGGGSGGGGSDIQMT |
| | | | QSPSSLSASVGDRVTITCKASQNVDTNVAWYQQKPGQAPKSLIYSAS |
| | | | YRYSDVPSRFSGSASGTDFTLTISSVQSEDFATYYCQQYDSYPYTFG |
| | | | GGTKLEIKSGGGGSEVQLVESGGGLVQPGGSLKLSCAASGFTFNKYA |
| | | | MNWVRQAPGKGLEWVARIRSKYNNYATYYADSVKDRFTISRDDSKNT |
| | | | AYLQMNNLKTEDTAVYYCVRHGNFGNSYISYWAYWGQGTLVTVSSGG |
| | | | GGSGGGGSGGGGSQTVVTQEPSLTVSPGGTVTLTCGSSTGAVTSGNY |
| | | | PNWVQQKPGQAPRGLIGGTKFLAPGTPARFSGSLLGGKAALTLSGVQ |
| | | | PEDEAEYYCVLWYSNRWVFGGGTKLTVLGGGGDKTHTCPPCPAPELL |
| | | | GGPSVFLFPPKPKDTLMISRTPEVTCVVVDVSHEDPEVKFNWYVDGV |
| | | | EVHNAKTKPCEEQYGSTYRCVSVLTVLHQDWLNGKEYKCKVSNKALP |
| | | | APIEKTISKAKGQPREPQVYTLPPSREEMTKNQVSLTCLVKGFYPSD |
| | | | IAVEWESNGQPENNYKTTPPVLDSDGSFFLYSKLTVDKSRWQQGNVF |
| | | | SCSVMHEALHNHYTQKSLSLSPGKGGGGSGGGGSGGGGSGGGGSGGG |
| | | | GSGGGGSDKTHTCPPCPAPELLGGPSVFLFPPKPKDTLMISRTPEVT |
| | | | CVVVDVSHEDPEVKFNWYVDGVEVHNAKTKPCEEQYGSTYRCVSVLT |
| | | | VLHQDWLNGKEYKCKVSNKALPAPIEKTISKAKGQPREPQVYTLPPS |
| | | | REEMTKNQVSLTCLVKGFYPSDIAVEWESNGQPENNYKTTPPVLDSD |
| | | | GSFFLYSKLTVDKSRWQQGNVFSCSVMHEALHNHYTQKSLSLSPGK |
| 107. | PM_4xCD3- | bispecific | QVQLVESGGGLVKPGESLRLSCAASGFTFSDYYMYWVRQAPGKGLEW |
| | scFc_delGK | HLE | VAIISDHYSHTYYSDIIKDRFTISRDNAKNSLYLQMNSLKAEDTAVY |
| | | molecule | YCARGFPLLRHGAMDYWGQGTLVTVSSGGGGSGGGGSGGGGSDIQMT |
| | | | QSPSSLSASVGDRVTITCKASQNVDTNVAWYQQKPGQAPKSLIYSAS |
| | | | YRYSDVPSRFSGSASGTDFTLTISSVQSEDFATYYCQQYDSYPYTFG |
| | | | GGTKLEIKSGGGGSEVQLVESGGGLVQPGGSLKLSCAASGFTFNKYA |
| | | | MNWVRQAPGKGLEWVARIRSKYNNYATYYADSVKDRFTISRDDSKNT |
| | | | AYLQMNNLKTEDTAVYYCVRHGNFGNSYISYWAYWGQGTLVTVSSGG |
| | | | GGSGGGGSGGGGSQTVVTQEPSLTVSPGGTVTLTCGSSTGAVTSGNY |
| | | | PNWVQQKPGQAPRGLIGGTKFLAPGTPARFSGSLLGGKAALTLSGVQ |
| | | | PEDEAEYYCVLWYSNRWVFGGGTKLTVLGGGGDKTHTCPPCPAPELL |
| | | | GGPSVFLFPPKPKDTLMISRTPEVTCVVVDVSHEDPEVKFNWYVDGV |
| | | | EVHNAKTKPCEEQYGSTYRCVSVLTVLHQDWLNGKEYKCKVSNKALP |
| | | | APIEKTISKAKGQPREPQVYTLPPSREEMTKNQVSLTCLVKGFYPSD |
| | | | IAVEWESNGQPENNYKTTPPVLDSDGSFFLYSKLTVDKSRWQQGNVF |
| | | | SCSVMHEALHNHYTQKSLSLSPGGGGSGGGGSGGGGSGGGGSGGGGS |
| | | | GGGGSDKTHTCPPCPAPELLGGPSVFLFPPKPKDTLMISRTPEVTCV |
| | | | VVDVSHEDPEVKFNWYVDGVEVHNAKTKPCEEQYGSTYRCVSVLTVL |
| | | | HQDWLNGKEYKCKVSNKALPAPIEKTISKAKGQPREPQVYTLPPSRE |
| | | | EMTKNQVSLTCLVKGFYPSDIAVEWESNGQPENNYKTTPPVLDSDGS |
| | | | FFLYSKLTVDKSRWQQGNVFSCSVMHEALHNHYTQKSLSLSPGK |
| 108. | PM_4_CCxCD3- | VH | QVQLVESGGGLVKPGESLRLSCAASGFTFSDYYMYWVRQAPGKCLEW |
| | scFc | | VAIISDHYSHTYYSDIIKDRFTISRDNAKNSLYLQMNSLKAEDTAVY |
| | | | YCARGFPLLRHGAMDYWGQGTLVTVSS |
| 109. | PM_4_CCxCD3- | VL | DIQMTQSPSSLSASVGDRVTITCKASQNVDTNVAWYQQKPGQAPKSL |
| | scFc | | IYSASYRYSDVPSRFSGSASGTDFTLTISSVQSEDFATYYCQQYDSY |
| | | | PYTFGCGTKLEIK |
| 110. | PM_4_CCxCD3- | scFv | QVQLVESGGGLVKPGESLRLSCAASGFTFSDYYMYWVRQAPGKCLEW |
| | scFc | | VAIISDHYSHTYYSDIIKDRFTISRDNAKNSLYLQMNSLKAEDTAVY |
| | | | YCARGFPLLRHGAMDYWGQGTLVTVSSGGGGSGGGGSGGGGSDIQMT |
| | | | QSPSSLSASVGDRVTITCKASQNVDTNVAWYQQKPGQAPKSLIYSAS |
| | | | YRYSDVPSRFSGSASGTDFTLTISSVQSEDFATYYCQQYDSYPYTFG |
| | | | CGTKLEIK |
| 111. | PM_4_CCxCD3- | bispecific | QVQLVESGGGLVKPGESLRLSCAASGFTFSDYYMYWVRQAPGKCLEW |
| | scFc | molecule | VAIISDHYSHTYYSDIIKDRFTISRDNAKNSLYLQMNSLKAEDTAVY |
| | | | YCARGFPLLRHGAMDYWGQGTLVTVSSGGGGSGGGGSGGGGSDIQMT |
| | | | QSPSSLSASVGDRVTITCKASQNVDTNVAWYQQKPGQAPKSLIYSAS |
| | | | YRYSDVPSRFSGSASGTDFTLTISSVQSEDFATYYCQQYDSYPYTFG |
| | | | CGTKLEIKSGGGGSEVQLVESGGGLVQPGGSLKLSCAASGFTFNKYA |
| | | | MNWVRQAPGKGLEWVARIRSKYNNYATYYADSVKDRFTISRDDSKNT |
| | | | AYLQMNNLKTEDTAVYYCVRHGNFGNSYISYWAYWGQGTLVTVSSGG |
| | | | GGSGGGGSGGGGSQTVVTQEPSLTVSPGGTVTLTCGSSTGAVTSGNY |
| | | | PNWVQQKPGQAPRGLIGGTKFLAPGTPARFSGSLLGGKAALTLSGVQ |
| | | | PEDEAEYYCVLWYSNRWVFGGGTKLTVL |
| 112. | PM_4_CCxCD3- | bispecific | QVQLVESGGGLVKPGESLRLSCAASGFTFSDYYMYWVRQAPGKCLEW |
| | scFc | HLE | VAIISDHYSHTYYSDIIKDRFTISRDNAKNSLYLQMNSLKAEDTAVY |
| | | molecule | YCARGFPLLRHGAMDYWGQGTLVTVSSGGGGSGGGGSGGGGSDIQMT |
| | | | QSPSSLSASVGDRVTITCKASQNVDTNVAWYQQKPGQAPKSLIYSAS |
| | | | YRYSDVPSRFSGSASGTDFTLTISSVQSEDFATYYCQQYDSYPYTFG |
| | | | CGTKLEIKSGGGGSEVQLVESGGGLVQPGGSLKLSCAASGFTFNKYA |
| | | | MNWVRQAPGKGLEWVARIRSKYNNYATYYADSVKDRFTISRDDSKNT |
| | | | AYLQMNNLKTEDTAVYYCVRHGNFGNSYISYWAYWGQGTLVTVSSGG |
| | | | GGSGGGGSGGGGSQTVVTQEPSLTVSPGGTVTLTCGSSTGAVTSGNY |
| | | | PNWVQQKPGQAPRGLIGGTKFLAPGTPARFSGSLLGGKAALTLSGVQ |
| | | | PEDEAEYYCVLWYSNRWVFGGGTKLTVLGGGGDKTHTCPPCPAPELL |
| | | | GGPSVFLFPPKPKDTLMISRTPEVTCVVVDVSHEDPEVKFNWYVDGV |
| | | | EVHNAKTKPCEEQYGSTYRCVSVLTVLHQDWLNGKEYKCKVSNKALP |
| | | | APIEKTISKAKGQPREPQVYTLPPSREEMTKNQVSLTCLVKGFYPSD |
| | | | IAVEWESNGQPENNYKTTPPVLDSDGSFFLYSKLTVDKSRWQQGNVF |
| | | | SCSVMHEALHNHYTQKSLSLSPGKGGGGSGGGGSGGGGSGGGGSGGG |
| | | | GSGGGGSDKTHTCPPCPAPELLGGPSVFLFPPKPKDTLMISRTPEVT |
| | | | CVVVDVSHEDPEVKFNWYVDGVEVHNAKTKPCEEQYGSTYRCVSVLT |
| | | | VLHQDWLNGKEYKCKVSNKALPAPIEKTISKAKGQPREPQVYTLPPS |
| | | | REEMTKNQVSLTCLVKGFYPSDIAVEWESNGQPENNYKTTPPVLDSD |
| | | | GSFFLYSKLTVDKSRWQQGNVFSCSVMHEALHNHYTQKSLSLSPGK |
| 113. | PM_4_CCxCD3- | bispecific | QVQLVESGGGLVKPGESLRLSCAASGFTFSDYYMYWVRQAPGKCLEW |
| | scFc_delGK | HLE | VAIISDHYSHTYYSDIIKDRFTISRDNAKNSLYLQMNSLKAEDTAVY |
| | | molecule | YCARGFPLLRHGAMDYWGQGTLVTVSSGGGGSGGGGSGGGGSDIQMT |
| | | | QSPSSLSASVGDRVTITCKASQNVDTNVAWYQQKPGQAPKSLIYSAS |
| | | | YRYSDVPSRFSGSASGTDFTLTISSVQSEDFATYYCQQYDSYPYTFG |
| | | | CGTKLEIKSGGGGSEVQLVESGGGLVQPGGSLKLSCAASGFTFNKYA |
| | | | MNWVRQAPGKGLEWVARIRSKYNNYATYYADSVKDRFTISRDDSKNT |
| | | | AYLQMNNLKTEDTAVYYCVRHGNFGNSYISYWAYWGQGTLVTVSSGG |
| | | | GGSGGGGSGGGGSQTVVTQEPSLTVSPGGTVTLTCGSSTGAVTSGNY |
| | | | PNWVQQKPGQAPRGLIGGTKFLAPGTPARFSGSLLGGKAALTLSGVQ |
| | | | PEDEAEYYCVLWYSNRWVFGGGTKLTVLGGGGDKTHTCPPCPAPELL |
| | | | GGPSVFLFPPKPKDTLMISRTPEVTCVVVDVSHEDPEVKFNWYVDGV |
| | | | EVHNAKTKPCEEQYGSTYRCVSVLTVLHQDWLNGKEYKCKVSNKALP |
| | | | APIEKTISKAKGQPREPQVYTLPPSREEMTKNQVSLTCLVKGFYPSD |
| | | | IAVEWESNGQPENNYKTTPPVLDSDGSFFLYSKLTVDKSRWQQGNVF |
| | | | SCSVMHEALHNHYTQKSLSLSPGGGGSGGGGSGGGGSGGGGSGGGGS |
| | | | GGGGSDKTHTCPPCPAPELLGGPSVFLFPPKPKDTLMISRTPEVTCV |
| | | | VVDVSHEDPEVKFNWYVDGVEVHNAKTKPCEEQYGSTYRCVSVLTVL |
| | | | HQDWLNGKEYKCKVSNKALPAPIEKTISKAKGQPREPQVYTLPPSRE |
| | | | EMTKNQVSLTCLVKGFYPSDIAVEWESNGQPENNYKTTPPVLDSDGS |
| | | | FFLYSKLTVDKSRWQQGNVFSCSVMHEALHNHYTQKSLSLSPGK |
| 114. | PM_5xCD3- | VH CDR1 | DYYMY |
| | scFc | | |
| 115. | PM_5xCD3- | VH CDR2 | IISDKRHHTYYSDIIKG |
| | scFc | | |
| 116. | PM_5xCD3- | VH CDR3 | GFPLLRHGAMDY |
| | scFc | | |
| 117. | PM_5xCD3- | VL CDR1 | KASQNVDTNVA |
| | scFc | | |
| 118. | PM_5xCD3- | VL CDR2 | SASYRYS |
| | scFc | | |
| 119. | PM_5xCD3- | VL CDR3 | QQYDSYPYT |
| | scFc | | |
| 120. | PM_5xCD3- | VH | QVQLVESGGGLVKPGESLRLSCAASGFTFSDYYMYWVRQAPGKGLEW |
| | scFc | | VAIISDKRHHTYYSDIIKGRFTISRDNAKNSLYLQMNSLKAEDTAVY |
| | | | YCARGFPLLRHGAMDYWGQGTLVTVSS |
| 121. | PM_5xCD3- | VL | DIQMTQSPSSLSASVGDRVTITCKASQNVDTNVAWYQQKPGQAPKSL |
| | scFc | | IYSASYRYSDVPSRFSGSASGTDFTLTISSVQSEDFATYYCQQYDSY |
| | | | PYTFGGGTKLEIK |
| 122. | PM_5xCD3- | scFv | QVQLVESGGGLVKPGESLRLSCAASGFTFSDYYMYWVRQAPGKGLEW |
| | scFc | | VAIISDKRHHTYYSDIIKGRFTISRDNAKNSLYLQMNSLKAEDTAVY |
| | | | YCARGFPLLRHGAMDYWGQGTLVTVSSGGGGSGGGGSGGGGSDIQMT |
| | | | QSPSSLSASVGDRVTITCKASQNVDTNVAWYQQKPGQAPKSLIYSAS |
| | | | YRYSDVPSRFSGSASGTDFTLTISSVQSEDFATYYCQQYDSYPYTFG |
| | | | GGTKLEIK |
| 123. | PM_5xCD3- | bispecific | QVQLVESGGGLVKPGESLRLSCAASGFTFSDYYMYWVRQAPGKGLEW |
| | scFc | molecule | VAIISDKRHHTYYSDIIKGRFTISRDNAKNSLYLQMNSLKAEDTAVY |
| | | | YCARGFPLLRHGAMDYWGQGTLVTVSSGGGGSGGGGSGGGGSDIQMT |
| | | | QSPSSLSASVGDRVTITCKASQNVDTNVAWYQQKPGQAPKSLIYSAS |
| | | | YRYSDVPSRFSGSASGTDFTLTISSVQSEDFATYYCQQYDSYPYTFG |
| | | | GGTKLEIKSGGGGSEVQLVESGGGLVQPGGSLKLSCAASGFTFNKYA |
| | | | MNWVRQAPGKGLEWVARIRSKYNNYATYYADSVKDRFTISRDDSKNT |
| | | | AYLQMNNLKTEDTAVYYCVRHGNFGNSYISYWAYWGQGTLVTVSSGG |
| | | | GGSGGGGSGGGGSQTVVTQEPSLTVSPGGTVTLTCGSSTGAVTSGNY |
| | | | PNWVQQKPGQAPRGLIGGTKFLAPGTPARFSGSLLGGKAALTLSGVQ |
| | | | PEDEAEYYCVLWYSNRWVFGGGTKLTVL |
| 124. | PM_5xCD3- | bispecific | QVQLVESGGGLVKPGESLRLSCAASGFTFSDYYMYWVRQAPGKGLEW |
| | scFc | HLE | VAIISDKRHHTYYSDIIKGRFTISRDNAKNSLYLQMNSLKAEDTAVY |
| | | molecule | YCARGFPLLRHGAMDYWGQGTLVTVSSGGGGSGGGGSGGGGSDIQMT |
| | | | QSPSSLSASVGDRVTITCKASQNVDTNVAWYQQKPGQAPKSLIYSAS |
| | | | YRYSDVPSRFSGSASGTDFTLTISSVQSEDFATYYCQQYDSYPYTFG |
| | | | GGTKLEIKSGGGGSEVQLVESGGGLVQPGGSLKLSCAASGFTFNKYA |
| | | | MNWVRQAPGKGLEWVARIRSKYNNYATYYADSVKDRFTISRDDSKNT |
| | | | AYLQMNNLKTEDTAVYYCVRHGNFGNSYISYWAYWGQGTLVTVSSGG |
| | | | GGSGGGGSGGGGSQTVVTQEPSLTVSPGGTVTLTCGSSTGAVTSGNY |
| | | | PNWVQQKPGQAPRGLIGGTKFLAPGTPARFSGSLLGGKAALTLSGVQ |
| | | | PEDEAEYYCVLWYSNRWVFGGGTKLTVLGGGGDKTHTCPPCPAPELL |
| | | | GGPSVFLFPPKPKDTLMISRTPEVTCVVVDVSHEDPEVKFNWYVDGV |
| | | | EVHNAKTKPCEEQYGSTYRCVSVLTVLHQDWLNGKEYKCKVSNKALP |
| | | | APIEKTISKAKGQPREPQVYTLPPSREEMTKNQVSLTCLVKGFYPSD |
| | | | IAVEWESNGQPENNYKTTPPVLDSDGSFFLYSKLTVDKSRWQQGNVF |
| | | | SCSVMHEALHNHYTQKSLSLSPGKGGGGSGGGGSGGGGSGGGGSGGG |
| | | | GSGGGGSDKTHTCPPCPAPELLGGPSVFLFPPKPKDTLMISRTPEVT |
| | | | CVVVDVSHEDPEVKFNWYVDGVEVHNAKTKPCEEQYGSTYRCVSVLT |
| | | | VLHQDWLNGKEYKCKVSNKALPAPIEKTISKAKGQPREPQVYTLPPS |
| | | | REEMTKNQVSLTCLVKGFYPSDIAVEWESNGQPENNYKTTPPVLDSD |
| | | | GSFFLYSKLTVDKSRWQQGNVFSCSVMHEALHNHYTQKSLSLSPGK |
| 125. | PM_5xCD3- | bispecific | QVQLVESGGGLVKPGESLRLSCAASGFTFSDYYMYWVRQAPGKGLEW |
| | scFcdeIGK | HLE | VAIISDKRHHTYYSDIIKGRFTISRDNAKNSLYLQMNSLKAEDTAVY |
| | | molecule | YCARGFPLLRHGAMDYWGQGTLVTVSSGGGGSGGGGSGGGGSDIQMT |
| | | | QSPSSLSASVGDRVTITCKASQNVDTNVAWYQQKPGQAPKSLIYSAS |
| | | | YRYSDVPSRFSGSASGTDFTLTISSVQSEDFATYYCQQYDSYPYTFG |
| | | | GGTKLEIKSGGGGSEVQLVESGGGLVQPGGSLKLSCAASGFTFNKYA |
| | | | MNWVRQAPGKGLEWVARIRSKYNNYATYYADSVKDRFTISRDDSKNT |
| | | | AYLQMNNLKTEDTAVYYCVRHGNFGNSYISYWAYWGQGTLVTVSSGG |
| | | | GGSGGGGSGGGGSQTVVTQEPSLTVSPGGTVTLTCGSSTGAVTSGNY |
| | | | PNWVQQKPGQAPRGLIGGTKFLAPGTPARFSGSLLGGKAALTLSGVQ |
| | | | PEDEAEYYCVLWYSNRWVFGGGTKLTVLGGGGDKTHTCPPCPAPELL |
| | | | GGPSVFLFPPKPKDTLMISRTPEVTCVVVDVSHEDPEVKFNWYVDGV |
| | | | EVHNAKTKPCEEQYGSTYRCVSVLTVLHQDWLNGKEYKCKVSNKALP |
| | | | APIEKTISKAKGQPREPQVYTLPPSREEMTKNQVSLTCLVKGFYPSD |
| | | | IAVEWESNGQPENNYKTTPPVLDSDGSFFLYSKLTVDKSRWQQGNVF |
| | | | SCSVMHEALHNHYTQKSLSLSPGGGGSGGGGSGGGGSGGGGSGGGGS |
| | | | GGGGSDKTHTCPPCPAPELLGGPSVFLFPPKPKDTLMISRTPEVTCV |
| | | | VVDVSHEDPEVKFNWYVDGVEVHNAKTKPCEEQYGSTYRCVSVLTVL |
| | | | HQDWLNGKEYKCKVSNKALPAPIEKTISKAKGQPREPQVYTLPPSRE |
| | | | EMTKNQVSLTCLVKGFYPSDIAVEWESNGQPENNYKTTPPVLDSDGS |
| | | | FFLYSKLTVDKSRWQQGNVFSCSVMHEALHNHYTQKSLSLSPGK |
| 126. | PM_5_CCxCD3- | VH | QVQLVESGGGLVKPGESLRLSCAASGFTFSDYYMYWVRQAPGKCLEW |
| | scFc | | AMDYWGQGTLVTVSS |
| 127. | PM_5_CCxCD3- | VL | DIQMTQSPSSLSASVGDRVTITCKASQNVDTNVAWYQQKPGQAPKSL |
| | scFc | | IYSASYRYSDVPSRFSGSASGTDFTLTISSVQSEDFATYYCQQYDSY |
| | | | PYTFGCGTKLEIK |
| 128. | PM_5_CCxCD3- | scFv | QVQLVESGGGLVKPGESLRLSCAASGFTFSDYYMYWVRQAPGKCLEW |
| | scFc | | VAIISDKRHHTYYSDIIKGRFTISRDNAKNSLYLQMNSLKAEDTAVY |
| | | | YCARGFPLLRHGAMDYWGQGTLVTVSSGGGGSGGGGSGGGGSDIQMT |
| | | | QSPSSLSASVGDRVTITCKASQNVDTNVAWYQQKPGQAPKSLIYSAS |
| | | | YRYSDVPSRFSGSASGTDFTLTISSVQSEDFATYYCQQYDSYPYTFG |
| | | | CGTKLEIK |
| 129. | PM_5_CCxCD3- | bispecific | QVQLVESGGGLVKPGESLRLSCAASGFTFSDYYMYWVRQAPGKCLEW |
| | scFc | molecule | VAIISDKRHHTYYSDIIKGRFTISRDNAKNSLYLQMNSLKAEDTAVY |
| | | | YCARGFPLLRHGAMDYWGQGTLVTVSSGGGGSGGGGSGGGGSDIQMT |
| | | | QSPSSLSASVGDRVTITCKASQNVDTNVAWYQQKPGQAPKSLIYSAS |
| | | | YRYSDVPSRFSGSASGTDFTLTISSVQSEDFATYYCQQYDSYPYTFG |
| | | | CGTKLEIKSGGGGSEVQLVESGGGLVQPGGSLKLSCAASGFTFNKYA |
| | | | MNWVRQAPGKGLEWVARIRSKYNNYATYYADSVKDRFTISRDDSKNT |
| | | | AYLQMNNLKTEDTAVYYCVRHGNFGNSYISYWAYWGQGTLVTVSSGG |
| | | | GGSGGGGSGGGGSQTVVTQEPSLTVSPGGTVTLTCGSSTGAVTSGNY |
| | | | PNWVQQKPGQAPRGLIGGTKFLAPGTPARFSGSLLGGKAALTLSGVQ |
| | | | PEDEAEYYCVLWYSNRWVFGGGTKLTVL |
| 130. | PM_5_CCxCD3- | bispecific | QVQLVESGGGLVKPGESLRLSCAASGFTFSDYYMYWVRQAPGKCLEW |
| | scFc | HLE | VAIISDKRHHTYYSDIIKGRFTISRDNAKNSLYLQMNSLKAEDTAVY |
| | | molecule | YCARGFPLLRHGAMDYWGQGTLVTVSSGGGGSGGGGSGGGGSDIQMT |
| | | | QSPSSLSASVGDRVTITCKASQNVDTNVAWYQQKPGQAPKSLIYSAS |
| | | | YRYSDVPSRFSGSASGTDFTLTISSVQSEDFATYYCQQYDSYPYTFG |
| | | | CGTKLEIKSGGGGSEVQLVESGGGLVQPGGSLKLSCAASGFTFNKYA |
| | | | MNWVRQAPGKGLEWVARIRSKYNNYATYYADSVKDRFTISRDDSKNT |
| | | | AYLQMNNLKTEDTAVYYCVRHGNFGNSYISYWAYWGQGTLVTVSSGG |
| | | | GGSGGGGSGGGGSQTVVTQEPSLTVSPGGTVTLTCGSSTGAVTSGNY |
| | | | PNWVQQKPGQAPRGLIGGTKFLAPGTPARFSGSLLGGKAALTLSGVQ |
| | | | PEDEAEYYCVLWYSNRWVFGGGTKLTVLGGGGDKTHTCPPCPAPELL |
| | | | GGPSVFLFPPKPKDTLMISRTPEVTCVVVDVSHEDPEVKFNWYVDGV |
| | | | EVHNAKTKPCEEQYGSTYRCVSVLTVLHQDWLNGKEYKCKVSNKALP |
| | | | APIEKTISKAKGQPREPQVYTLPPSREEMTKNQVSLTCLVKGFYPSD |
| | | | IAVEWESNGQPENNYKTTPPVLDSDGSFFLYSKLTVDKSRWQQGNVF |
| | | | SCSVMHEALHNHYTQKSLSLSPGKGGGGSGGGGSGGGGSGGGGSGGG |
| | | | GSGGGGSDKTHTCPPCPAPELLGGPSVFLFPPKPKDTLMISRTPEVT |
| | | | CVVVDVSHEDPEVKFNWYVDGVEVHNAKTKPCEEQYGSTYRCVSVLT |
| | | | VLHQDWLNGKEYKCKVSNKALPAPIEKTISKAKGQPREPQVYTLPPS |
| | | | REEMTKNQVSLTCLVKGFYPSDIAVEWESNGQPENNYKTTPPVLDSD |
| | | | GSFFLYSKLTVDKSRWQQGNVFSCSVMHEALHNHYTQKSLSLSPGK |
| 131. | PM_5_CCxCD3- | bispecific | QVQLVESGGGLVKPGESLRLSCAASGFTFSDYYMYWVRQAPGKCLEW |
| | scFc_delGK | HLE | VAIISDKRHHTYYSDIIKGRFTISRDNAKNSLYLQMNSLKAEDTAVY |
| | | molecule | YCARGFPLLRHGAMDYWGQGTLVTVSSGGGGSGGGGSGGGGSDIQMT |
| | | | QSPSSLSASVGDRVTITCKASQNVDTNVAWYQQKPGQAPKSLIYSAS |
| | | | YRYSDVPSRFSGSASGTDFTLTISSVQSEDFATYYCQQYDSYPYTFG |
| | | | CGTKLEIKSGGGGSEVQLVESGGGLVQPGGSLKLSCAASGFTFNKYA |
| | | | MNWVRQAPGKGLEWVARIRSKYNNYATYYADSVKDRFTISRDDSKNT |
| | | | AYLQMNNLKTEDTAVYYCVRHGNFGNSYISYWAYWGQGTLVTVSSGG |
| | | | GGSGGGGSGGGGSQTVVTQEPSLTVSPGGTVTLTCGSSTGAVTSGNY |
| | | | PNWVQQKPGQAPRGLIGGTKFLAPGTPARFSGSLLGGKAALTLSGVQ |
| | | | PEDEAEYYCVLWYSNRWVFGGGTKLTVLGGGGDKTHTCPPCPAPELL |
| | | | GGPSVFLFPPKPKDTLMISRTPEVTCVVVDVSHEDPEVKFNWYVDGV |
| | | | EVHNAKTKPCEEQYGSTYRCVSVLTVLHQDWLNGKEYKCKVSNKALP |
| | | | APIEKTISKAKGQPREPQVYTLPPSREEMTKNQVSLTCLVKGFYPSD |
| | | | IAVEWESNGQPENNYKTTPPVLDSDGSFFLYSKLTVDKSRWQQGNVF |
| | | | SCSVMHEALHNHYTQKSLSLSPGGGGSGGGGSGGGGSGGGGSGGGGS |
| | | | GGGGSDKTHTCPPCPAPELLGGPSVFLFPPKPKDTLMISRTPEVTCV |
| | | | VVDVSHEDPEVKFNWYVDGVEVHNAKTKPCEEQYGSTYRCVSVLTVL |
| | | | HQDWLNGKEYKCKVSNKALPAPIEKTISKAKGQPREPQVYTLPPSRE |
| | | | EMTKNQVSLTCLVKGFYPSDIAVEWESNGQPENNYKTTPPVLDSDGS |
| | | | FFLYSKLTVDKSRWQQGNVFSCSVMHEALHNHYTQKSLSLSPGK |
| 132. | PM_6xCD3- | VH CDR1 | DYYMY |
| | scFc | | |
| 133. | PM_6xCD3- | VH CDR2 | IISDKRHHTYYSDIIKG |
| | scFc | | |
| 134. | PM_6xCD3- | VH CDR3 | GFPLLRHGAMDY |
| | scFc | | |
| 135. | PM_6xCD3- | VL CDR1 | KASQNVDTNVA |
| | scFc | | |
| 136. | PM_6xCD3- | VL CDR2 | SASYRYS |
| | scFc | | |
| 137. | PM_6xCD3- | VL CDR3 | QQYDDLRPT |
| | scFc | | |
| 138. | PM_6xCD3- | VH | QVQLVESGGGLVKPGESLRLSCAASGFTFSDYYMYWVRQAPGKGLEW |
| | scFc | | VAIISDKRHHTYYSDIIKGRFTISRDNAKNSLYLQMNSLKAEDTAVY |
| | | | YCARGFPLLRHGAMDYWGQGTLVTVSS |
| 139. | PM_6xCD3- | VL | DIQMTQSPSSLSASVGDRVTITCKASQNVDTNVAWYQQKPGQAPKSL |
| | scFc | | IYSASYRYSDVPSRFSGSASGTDFTLTISSLQSEDFATYYCQQYDDL |
| | | | RPTFGGGTKLEIK |
| 140. | PM_6xCD3- | scFv | QVQLVESGGGLVKPGESLRLSCAASGFTFSDYYMYWVRQAPGKGLEW |
| | scFc | | VAIISDKRHHTYYSDIIKGRFTISRDNAKNSLYLQMNSLKAEDTAVY |
| | | | YCARGFPLLRHGAMDYWGQGTLVTVSSGGGGSGGGGSGGGGSDIQMT |
| | | | QSPSSLSASVGDRVTITCKASQNVDTNVAWYQQKPGQAPKSLIYSAS |
| | | | YRYSDVPSRFSGSASGTDFTLTISSLQSEDFATYYCQQYDDLRPTFG |
| | | | GGTKLEIK |
| 141. | PM_6xCD3- | bispecific | QVQLVESGGGLVKPGESLRLSCAASGFTFSDYYMYWVRQAPGKGLEW |
| | scFc | molecule | VAIISDKRHHTYYSDIIKGRFTISRDNAKNSLYLQMNSLKAEDTAVY |
| | | | YCARGFPLLRHGAMDYWGQGTLVTVSSGGGGSGGGGSGGGGSDIQMT |
| | | | QSPSSLSASVGDRVTITCKASQNVDTNVAWYQQKPGQAPKSLIYSAS |
| | | | YRYSDVPSRFSGSASGTDFTLTISSLQSEDFATYYCQQYDDLRPTFG |
| | | | GGTKLEIKSGGGGSEVQLVESGGGLVQPGGSLKLSCAASGFTFNKYA |
| | | | MNWVRQAPGKGLEWVARIRSKYNNYATYYADSVKDRFTISRDDSKNT |
| | | | AYLQMNNLKTEDTAVYYCVRHGNFGNSYISYWAYWGQGTLVTVSSGG |
| | | | GGSGGGGSGGGGSQTVVTQEPSLTVSPGGTVTLTCGSSTGAVTSGNY |
| | | | PNWVQQKPGQAPRGLIGGTKFLAPGTPARFSGSLLGGKAALTLSGVQ |
| | | | PEDEAEYYCVLWYSNRWVFGGGTKLTVL |
| 142. | PM_6xCD3- | bispecific | QVQLVESGGGLVKPGESLRLSCAASGFTFSDYYMYWVRQAPGKGLEW |
| | scFc | HLE | VAIISDKRHHTYYSDIIKGRFTISRDNAKNSLYLQMNSLKAEDTAVY |
| | | molecule | YCARGFPLLRHGAMDYWGQGTLVTVSSGGGGSGGGGSGGGGSDIQMT |
| | | | QSPSSLSASVGDRVTITCKASQNVDTNVAWYQQKPGQAPKSLIYSAS |
| | | | YRYSDVPSRFSGSASGTDFTLTISSLQSEDFATYYCQQYDDLRPTFG |
| | | | GGTKLEIKSGGGGSEVQLVESGGGLVQPGGSLKLSCAASGFTFNKYA |
| | | | MNWVRQAPGKGLEWVARIRSKYNNYATYYADSVKDRFTISRDDSKNT |
| | | | AYLQMNNLKTEDTAVYYCVRHGNFGNSYISYWAYWGQGTLVTVSSGG |
| | | | GGSGGGGSGGGGSQTVVTQEPSLTVSPGGTVTLTCGSSTGAVTSGNY |
| | | | PNWVQQKPGQAPRGLIGGTKFLAPGTPARFSGSLLGGKAALTLSGVQ |
| | | | PEDEAEYYCVLWYSNRWVFGGGTKLTVLGGGGDKTHTCPPCPAPELL |
| | | | GGPSVFLFPPKPKDTLMISRTPEVTCVVVDVSHEDPEVKFNWYVDGV |
| | | | EVHNAKTKPCEEQYGSTYRCVSVLTVLHQDWLNGKEYKCKVSNKALP |
| | | | APIEKTISKAKGQPREPQVYTLPPSREEMTKNQVSLTCLVKGFYPSD |
| | | | IAVEWESNGQPENNYKTTPPVLDSDGSFFLYSKLTVDKSRWQQGNVF |
| | | | SCSVMHEALHNHYTQKSLSLSPGKGGGGSGGGGSGGGGSGGGGSGGG |
| | | | GSGGGGSDKTHTCPPCPAPELLGGPSVFLFPPKPKDTLMISRTPEVT |
| | | | CVVVDVSHEDPEVKFNWYVDGVEVHNAKTKPCEEQYGSTYRCVSVLT |
| | | | VLHQDWLNGKEYKCKVSNKALPAPIEKTISKAKGQPREPQVYTLPPS |
| | | | REEMTKNQVSLTCLVKGFYPSDIAVEWESNGQPENNYKTTPPVLDSD |
| | | | GSFFLYSKLTVDKSRWQQGNVFSCSVMHEALHNHYTQKSLSLSPGK |
| 143. | PM_6xCD3- | bispecific | QVQLVESGGGLVKPGESLRLSCAASGFTFSDYYMYWVRQAPGKGLEW |
| | scFcdeIGK | HLE | VAIISDKRHHTYYSDIIKGRFTISRDNAKNSLYLQMNSLKAEDTAVY |
| | | molecule | YCARGFPLLRHGAMDYWGQGTLVTVSSGGGGSGGGGSGGGGSDIQMT |
| | | | QSPSSLSASVGDRVTITCKASQNVDTNVAWYQQKPGQAPKSLIYSAS |
| | | | YRYSDVPSRFSGSASGTDFTLTISSLQSEDFATYYCQQYDDLRPTFG |
| | | | GGTKLEIKSGGGGSEVQLVESGGGLVQPGGSLKLSCAASGFTFNKYA |
| | | | MNWVRQAPGKGLEWVARIRSKYNNYATYYADSVKDRFTISRDDSKNT |
| | | | AYLQMNNLKTEDTAVYYCVRHGNFGNSYISYWAYWGQGTLVTVSSGG |
| | | | GGSGGGGSGGGGSQTVVTQEPSLTVSPGGTVTLTCGSSTGAVTSGNY |
| | | | PNWVQQKPGQAPRGLIGGTKFLAPGTPARFSGSLLGGKAALTLSGVQ |
| | | | PEDEAEYYCVLWYSNRWVFGGGTKLTVLGGGGDKTHTCPPCPAPELL |
| | | | GGPSVFLFPPKPKDTLMISRTPEVTCVVVDVSHEDPEVKFNWYVDGV |
| | | | EVHNAKTKPCEEQYGSTYRCVSVLTVLHQDWLNGKEYKCKVSNKALP |
| | | | APIEKTISKAKGQPREPQVYTLPPSREEMTKNQVSLTCLVKGFYPSD |
| | | | IAVEWESNGQPENNYKTTPPVLDSDGSFFLYSKLTVDKSRWQQGNVF |
| | | | SCSVMHEALHNHYTQKSLSLSPGGGGSGGGGSGGGGSGGGGSGGGGS |
| | | | GGGGSDKTHTCPPCPAPELLGGPSVFLFPPKPKDTLMISRTPEVTCV |
| | | | VVDVSHEDPEVKFNWYVDGVEVHNAKTKPCEEQYGSTYRCVSVLTVL |
| | | | HQDWLNGKEYKCKVSNKALPAPIEKTISKAKGQPREPQVYTLPPSRE |
| | | | EMTKNQVSLTCLVKGFYPSDIAVEWESNGQPENNYKTTPPVLDSDGS |
| | | | FFLYSKLTVDKSRWQQGNVFSCSVMHEALHNHYTQKSLSLSPGK |
| 144. | PM_6_CCxCD3- | VH | QVQLVESGGGLVKPGESLRLSCAASGFTFSDYYMYWVRQAPGKCLEW |
| | scFc | | VAIISDKRHHTYYSDIIKGRFTISRDNAKNSLYLQMNSLKAEDTAVY |
| | | | YCARGFPLLRHGAMDYWGQGTLVTVSS |
| 145. | PM_6_CCxCD3- | VL | DIQMTQSPSSLSASVGDRVTITCKASQNVDTNVAWYQQKPGQAPKSL |
| | scFc | | IYSASYRYSDVPSRFSGSASGTDFTLTISSLQSEDFATYYCQQYDDL |
| | | | RPTFGCGTKLEIK |
| 146. | PM_6_CCxCD3- | scFv | QVQLVESGGGLVKPGESLRLSCAASGFTFSDYYMYWVRQAPGKCLEW |
| | scFc | | VAIISDKRHHTYYSDIIKGRFTISRDNAKNSLYLQMNSLKAEDTAVY |
| | | | YCARGFPLLRHGAMDYWGQGTLVTVSSGGGGSGGGGSGGGGSDIQMT |
| | | | QSPSSLSASVGDRVTITCKASQNVDTNVAWYQQKPGQAPKSLIYSAS |
| | | | YRYSDVPSRFSGSASGTDFTLTISSLQSEDFATYYCQQYDDLRPTFG |
| | | | CGTKLEIK |
| 147. | PM_6_CCxCD3- | bispecific | QVQLVESGGGLVKPGESLRLSCAASGFTFSDYYMYWVRQAPGKCLEW |
| | scFc | molecule | VAIISDKRHHTYYSDIIKGRFTISRDNAKNSLYLQMNSLKAEDTAVY |
| | | | YCARGFPLLRHGAMDYWGQGTLVTVSSGGGGSGGGGSGGGGSDIQMT |
| | | | QSPSSLSASVGDRVTITCKASQNVDTNVAWYQQKPGQAPKSLIYSAS |
| | | | YRYSDVPSRFSGSASGTDFTLTISSLQSEDFATYYCQQYDDLRPTFG |
| | | | CGTKLEIKSGGGGSEVQLVESGGGLVQPGGSLKLSCAASGFTFNKYA |
| | | | MNWVRQAPGKGLEWVARIRSKYNNYATYYADSVKDRFTISRDDSKNT |
| | | | AYLQMNNLKTEDTAVYYCVRHGNFGNSYISYWAYWGQGTLVTVSSGG |
| | | | GGSGGGGSGGGGSQTVVTQEPSLTVSPGGTVTLTCGSSTGAVTSGNY |
| | | | PNWVQQKPGQAPRGLIGGTKFLAPGTPARFSGSLLGGKAALTLSGVQ |
| | | | PEDEAEYYCVLWYSNRWVFGGGTKLTVL |
| 148. | PM_6_CCxCD3- | bispecific | QVQLVESGGGLVKPGESLRLSCAASGFTFSDYYMYWVRQAPGKCLEW |
| | scFc | HLE | VAIISDKRHHTYYSDIIKGRFTISRDNAKNSLYLQMNSLKAEDTAVY |
| | | molecule | YCARGFPLLRHGAMDYWGQGTLVTVSSGGGGSGGGGSGGGGSDIQMT |
| | | | QSPSSLSASVGDRVTITCKASQNVDTNVAWYQQKPGQAPKSLIYSAS |
| | | | YRYSDVPSRFSGSASGTDFTLTISSLQSEDFATYYCQQYDDLRPTFG |
| | | | CGTKLEIKSGGGGSEVQLVESGGGLVQPGGSLKLSCAASGFTFNKYA |
| | | | MNWVRQAPGKGLEWVARIRSKYNNYATYYADSVKDRFTISRDDSKNT |
| | | | AYLQMNNLKTEDTAVYYCVRHGNFGNSYISYWAYWGQGTLVTVSSGG |
| | | | GGSGGGGSGGGGSQTVVTQEPSLTVSPGGTVTLTCGSSTGAVTSGNY |
| | | | PNWVQQKPGQAPRGLIGGTKFLAPGTPARFSGSLLGGKAALTLSGVQ |
| | | | PEDEAEYYCVLWYSNRWVFGGGTKLTVLGGGGDKTHTCPPCPAPELL |
| | | | GGPSVFLFPPKPKDTLMISRTPEVTCVVVDVSHEDPEVKFNWYVDGV |
| | | | EVHNAKTKPCEEQYGSTYRCVSVLTVLHQDWLNGKEYKCKVSNKALP |
| | | | APIEKTISKAKGQPREPQVYTLPPSREEMTKNQVSLTCLVKGFYPSD |
| | | | IAVEWESNGQPENNYKTTPPVLDSDGSFFLYSKLTVDKSRWQQGNVF |
| | | | SCSVMHEALHNHYTQKSLSLSPGKGGGGSGGGGSGGGGSGGGGSGGG |
| | | | GSGGGGSDKTHTCPPCPAPELLGGPSVFLFPPKPKDTLMISRTPEVT |
| | | | CVVVDVSHEDPEVKFNWYVDGVEVHNAKTKPCEEQYGSTYRCVSVLT |
| | | | VLHQDWLNGKEYKCKVSNKALPAPIEKTISKAKGQPREPQVYTLPPS |
| | | | REEMTKNQVSLTCLVKGFYPSDIAVEWESNGQPENNYKTTPPVLDSD |
| | | | GSFFLYSKLTVDKSRWQQGNVFSCSVMHEALHNHYTQKSLSLSPGK |
| 149. | PM_6_CCxCD3- | bispecific | QVQLVESGGGLVKPGESLRLSCAASGFTFSDYYMYWVRQAPGKCLEW |
| | scFc_delGK | HLE | VAIISDKRHHTYYSDIIKGRFTISRDNAKNSLYLQMNSLKAEDTAVY |
| | | molecule | YCARGFPLLRHGAMDYWGQGTLVTVSSGGGGSGGGGSGGGGSDIQMT |
| | | | QSPSSLSASVGDRVTITCKASQNVDTNVAWYQQKPGQAPKSLIYSAS |
| | | | YRYSDVPSRFSGSASGTDFTLTISSLQSEDFATYYCQQYDDLRPTFG |
| | | | CGTKLEIKSGGGGSEVQLVESGGGLVQPGGSLKLSCAASGFTFNKYA |
| | | | MNWVRQAPGKGLEWVARIRSKYNNYATYYADSVKDRFTISRDDSKNT |
| | | | AYLQMNNLKTEDTAVYYCVRHGNFGNSYISYWAYWGQGTLVTVSSGG |
| | | | GGSGGGGSGGGGSQTVVTQEPSLTVSPGGTVTLTCGSSTGAVTSGNY |
| | | | PNWVQQKPGQAPRGLIGGTKFLAPGTPARFSGSLLGGKAALTLSGVQ |
| | | | PEDEAEYYCVLWYSNRWVFGGGTKLTVLGGGGDKTHTCPPCPAPELL |
| | | | GGPSVFLFPPKPKDTLMISRTPEVTCVVVDVSHEDPEVKFNWYVDGV |
| | | | EVHNAKTKPCEEQYGSTYRCVSVLTVLHQDWLNGKEYKCKVSNKALP |
| | | | APIEKTISKAKGQPREPQVYTLPPSREEMTKNQVSLTCLVKGFYPSD |
| | | | IAVEWESNGQPENNYKTTPPVLDSDGSFFLYSKLTVDKSRWQQGNVF |
| | | | SCSVMHEALHNHYTQKSLSLSPGGGGSGGGGSGGGGSGGGGSGGGGS |
| | | | GGGGSDKTHTCPPCPAPELLGGPSVFLFPPKPKDTLMISRTPEVTCV |
| | | | VVDVSHEDPEVKFNWYVDGVEVHNAKTKPCEEQYGSTYRCVSVLTVL |
| | | | HQDWLNGKEYKCKVSNKALPAPIEKTISKAKGQPREPQVYTLPPSRE |
| | | | EMTKNQVSLTCLVKGFYPSDIAVEWESNGQPENNYKTTPPVLDSDGS |
| | | | FFLYSKLTVDKSRWQQGNVFSCSVMHEALHNHYTQKSLSLSPGK |
| 150. | PM_7xCD3- | VH CDR1 | DYYMY |
| | scFc | | |
| 151. | PM_7xCD3- | VH CDR2 | IISDGGYYTYYSDIIKG |
| | scFc | | |
| 152. | PM_7xCD3- | VH CDR3 | GFPLLRHGAMDY |
| | scFc | | |
| 153. | PM_7xCD3- | VL CDR1 | KASQNVDTNVA |
| | scFc | | |
| 154. | PM_7xCD3- | VL CDR2 | SASYRYS |
| | scFc | | |
| 155. | PM_7xCD3- | VL CDR3 | QQYDQQLIT |
| | scFc | | |
| 156. | PM_7xCD3- | VH | QVQLVESGGGLVKPGESLRLSCAASGFTFSDYYMYWVRQAPGKGLEW |
| | scFc | | VAIISDGGYYTYYSDIIKGRFTISRDNAKNSLYLQMNSLKAEDTAVY |
| | | | YCARGFPLLRHGAMDYWGQGTLVTVSS |
| 157. | PM_7xCD3- | VL | DIQMTQSPSSLSASVGDRVTITCKASQNVDTNVAWYQQKPGQAPKSL |
| | scFc | | IYSASYRYSDVPSRFSGSASGTDFTLTISSVQSEDFATYYCQQYDQQ |
| | | | LITFGGGTKLEIK |
| 158. | PM_7xCD3- | scFv | QVQLVESGGGLVKPGESLRLSCAASGFTFSDYYMYWVRQAPGKGLEW |
| | scFc | | VAIISDGGYYTYYSDIIKGRFTISRDNAKNSLYLQMNSLKAEDTAVY |
| | | | YCARGFPLLRHGAMDYWGQGTLVTVSSGGGGSGGGGSGGGGSDIQMT |
| | | | QSPSSLSASVGDRVTITCKASQNVDTNVAWYQQKPGQAPKSLIYSAS |
| | | | YRYSDVPSRFSGSASGTDFTLTISSVQSEDFATYYCQQYDQQLITFG |
| | | | GGTKLEIK |
| 159. | PM_7xCD3- | bispecific | QVQLVESGGGLVKPGESLRLSCAASGFTFSDYYMYWVRQAPGKGLEW |
| | scFc | molecule | VAIISDGGYYTYYSDIIKGRFTISRDNAKNSLYLQMNSLKAEDTAVY |
| | | | YCARGFPLLRHGAMDYWGQGTLVTVSSGGGGSGGGGSGGGGSDIQMT |
| | | | QSPSSLSASVGDRVTITCKASQNVDTNVAWYQQKPGQAPKSLIYSAS |
| | | | YRYSDVPSRFSGSASGTDFTLTISSVQSEDFATYYCQQYDQQLITFG |
| | | | GGTKLEIKSGGGGSEVQLVESGGGLVQPGGSLKLSCAASGFTFNKYA |
| | | | MNWVRQAPGKGLEWVARIRSKYNNYATYYADSVKDRFTISRDDSKNT |
| | | | AYLQMNNLKTEDTAVYYCVRHGNFGNSYISYWAYWGQGTLVTVSSGG |
| | | | GGSGGGGSGGGGSQTVVTQEPSLTVSPGGTVTLTCGSSTGAVTSGNY |
| | | | PNWVQQKPGQAPRGLIGGTKFLAPGTPARFSGSLLGGKAALTLSGVQ |
| | | | PEDEAEYYCVLWYSNRWVFGGGTKLTVL |
| 160. | PM_7xCD3- | bispecific | QVQLVESGGGLVKPGESLRLSCAASGFTFSDYYMYWVRQAPGKGLEW |
| | scFc | HLE | VAIISDGGYYTYYSDIIKGRFTISRDNAKNSLYLQMNSLKAEDTAVY |
| | | molecule | YCARGFPLLRHGAMDYWGQGTLVTVSSGGGGSGGGGSGGGGSDIQMT |
| | | | QSPSSLSASVGDRVTITCKASQNVDTNVAWYQQKPGQAPKSLIYSAS |
| | | | YRYSDVPSRFSGSASGTDFTLTISSVQSEDFATYYCQQYDQQLITFG |
| | | | GGTKLEIKSGGGGSEVQLVESGGGLVQPGGSLKLSCAASGFTFNKYA |
| | | | MNWVRQAPGKGLEWVARIRSKYNNYATYYADSVKDRFTISRDDSKNT |
| | | | AYLQMNNLKTEDTAVYYCVRHGNFGNSYISYWAYWGQGTLVTVSSGG |
| | | | GGSGGGGSGGGGSQTVVTQEPSLTVSPGGTVTLTCGSSTGAVTSGNY |
| | | | PNWVQQKPGQAPRGLIGGTKFLAPGTPARFSGSLLGGKAALTLSGVQ |
| | | | PEDEAEYYCVLWYSNRWVFGGGTKLTVLGGGGDKTHTCPPCPAPELL |
| | | | GGPSVFLFPPKPKDTLMISRTPEVTCVVVDVSHEDPEVKFNWYVDGV |
| | | | EVHNAKTKPCEEQYGSTYRCVSVLTVLHQDWLNGKEYKCKVSNKALP |
| | | | APIEKTISKAKGQPREPQVYTLPPSREEMTKNQVSLTCLVKGFYPSD |
| | | | IAVEWESNGQPENNYKTTPPVLDSDGSFFLYSKLTVDKSRWQQGNVF |
| | | | SCSVMHEALHNHYTQKSLSLSPGKGGGGSGGGGSGGGGSGGGGSGGG |
| | | | GSGGGGSDKTHTCPPCPAPELLGGPSVFLFPPKPKDTLMISRTPEVT |
| | | | CVVVDVSHEDPEVKFNWYVDGVEVHNAKTKPCEEQYGSTYRCVSVLT |
| | | | VLHQDWLNGKEYKCKVSNKALPAPIEKTISKAKGQPREPQVYTLPPS |
| | | | REEMTKNQVSLTCLVKGFYPSDIAVEWESNGQPENNYKTTPPVLDSD |
| | | | GSFFLYSKLTVDKSRWQQGNVFSCSVMHEALHNHYTQKSLSLSPGK |
| 161. | PM_7xCD3- | bispecific | QVQLVESGGGLVKPGESLRLSCAASGFTFSDYYMYWVRQAPGKGLEW |
| | scFc_delGK | HLE | VAIISDGGYYTYYSDIIKGRFTISRDNAKNSLYLQMNSLKAEDTAVY |
| | | molecule | YCARGFPLLRHGAMDYWGQGTLVTVSSGGGGSGGGGSGGGGSDIQMT |
| | | | QSPSSLSASVGDRVTITCKASQNVDTNVAWYQQKPGQAPKSLIYSAS |
| | | | YRYSDVPSRFSGSASGTDFTLTISSVQSEDFATYYCQQYDQQLITFG |
| | | | GGTKLEIKSGGGGSEVQLVESGGGLVQPGGSLKLSCAASGFTFNKYA |
| | | | MNWVRQAPGKGLEWVARIRSKYNNYATYYADSVKDRFTISRDDSKNT |
| | | | AYLQMNNLKTEDTAVYYCVRHGNFGNSYISYWAYWGQGTLVTVSSGG |
| | | | GGSGGGGSGGGGSQTVVTQEPSLTVSPGGTVTLTCGSSTGAVTSGNY |
| | | | PNWVQQKPGQAPRGLIGGTKFLAPGTPARFSGSLLGGKAALTLSGVQ |
| | | | PEDEAEYYCVLWYSNRWVFGGGTKLTVLGGGGDKTHTCPPCPAPELL |
| | | | GGPSVFLFPPKPKDTLMISRTPEVTCVVVDVSHEDPEVKFNWYVDGV |
| | | | EVHNAKTKPCEEQYGSTYRCVSVLTVLHQDWLNGKEYKCKVSNKALP |
| | | | APIEKTISKAKGQPREPQVYTLPPSREEMTKNQVSLTCLVKGFYPSD |
| | | | IAVEWESNGQPENNYKTTPPVLDSDGSFFLYSKLTVDKSRWQQGNVF |
| | | | SCSVMHEALHNHYTQKSLSLSPGGGGSGGGGSGGGGSGGGGSGGGGS |
| | | | GGGGSDKTHTCPPCPAPELLGGPSVFLFPPKPKDTLMISRTPEVTCV |
| | | | VVDVSHEDPEVKFNWYVDGVEVHNAKTKPCEEQYGSTYRCVSVLTVL |
| | | | HQDWLNGKEYKCKVSNKALPAPIEKTISKAKGQPREPQVYTLPPSRE |
| | | | EMTKNQVSLTCLVKGFYPSDIAVEWESNGQPENNYKTTPPVLDSDGS |
| | | | FFLYSKLTVDKSRWQQGNVFSCSVMHEALHNHYTQKSLSLSPGK |
| 162. | PM_7_CCxCD | VH | QVQLVESGGGLVKPGESLRLSCAASGFTFSDYYMYWVRQAPGKCLEW |
| | 3-scFc | | VAIISDGGYYTYYSDIIKGRFTISRDNAKNSLYLQMNSLKAEDTAVY |
| | | | YCARGFPLLRHGAMDYWGQGTLVTVSS |
| 163. | PM_7_CCxCD3- | VL | DIQMTQSPSSLSASVGDRVTITCKASQNVDTNVAWYQQKPGQAPKSL |
| | scFc | | IYSASYRYSDVPSRFSGSASGTDFTLTISSVQSEDFATYYCQQYDQQ |
| | | | LITFGCGTKLEIK |
| 164. | PM_7_CCxCD | scFv | QVQLVESGGGLVKPGESLRLSCAASGFTFSDYYMYWVRQAPGKCLEW |
| | 3-scFc | | VAIISDGGYYTYYSDIIKGRFTISRDNAKNSLYLQMNSLKAEDTAVY |
| | | | YCARGFPLLRHGAMDYWGQGTLVTVSSGGGGSGGGGSGGGGSDIQMT |
| | | | QSPSSLSASVGDRVTITCKASQNVDTNVAWYQQKPGQAPKSLIYSAS |
| | | | YRYSDVPSRFSGSASGTDFTLTISSVQSEDFATYYCQQYDQQLITFG |
| | | | CGTKLEIK |
| 165. | PM_7_CCxCD3- | bispecific | QVQLVESGGGLVKPGESLRLSCAASGFTFSDYYMYWVRQAPGKCLEW |
| | scFc | molecule | VAIISDGGYYTYYSDIIKGRFTISRDNAKNSLYLQMNSLKAEDTAVY |
| | | | YCARGFPLLRHGAMDYWGQGTLVTVSSGGGGSGGGGSGGGGSDIQMT |
| | | | QSPSSLSASVGDRVTITCKASQNVDTNVAWYQQKPGQAPKSLIYSAS |
| | | | YRYSDVPSRFSGSASGTDFTLTISSVQSEDFATYYCQQYDQQLITFG |
| | | | CGTKLEIKSGGGGSEVQLVESGGGLVQPGGSLKLSCAASGFTFNKYA |
| | | | MNWVRQAPGKGLEWVARIRSKYNNYATYYADSVKDRFTISRDDSKNT |
| | | | AYLQMNNLKTEDTAVYYCVRHGNFGNSYISYWAYWGQGTLVTVSSGG |
| | | | GGSGGGGSGGGGSQTVVTQEPSLTVSPGGTVTLTCGSSTGAVTSGNY |
| | | | PNWVQQKPGQAPRGLIGGTKFLAPGTPARFSGSLLGGKAALTLSGVQ |
| | | | PEDEAEYYCVLWYSNRWVFGGGTKLTVL |
| 166. | PM_7_CCxCD3- | bispecific | QVQLVESGGGLVKPGESLRLSCAASGFTFSDYYMYWVRQAPGKCLEW |
| | scFc | HLE | VAIISDGGYYTYYSDIIKGRFTISRDNAKNSLYLQMNSLKAEDTAVY |
| | | molecule | YCARGFPLLRHGAMDYWGQGTLVTVSSGGGGSGGGGSGGGGSDIQMT |
| | | | QSPSSLSASVGDRVTITCKASQNVDTNVAWYQQKPGQAPKSLIYSAS |
| | | | YRYSDVPSRFSGSASGTDFTLTISSVQSEDFATYYCQQYDQQLITFG |
| | | | CGTKLEIKSGGGGSEVQLVESGGGLVQPGGSLKLSCAASGFTFNKYA |
| | | | MNWVRQAPGKGLEWVARIRSKYNNYATYYADSVKDRFTISRDDSKNT |
| | | | AYLQMNNLKTEDTAVYYCVRHGNFGNSYISYWAYWGQGTLVTVSSGG |
| | | | GGSGGGGSGGGGSQTVVTQEPSLTVSPGGTVTLTCGSSTGAVTSGNY |
| | | | PNWVQQKPGQAPRGLIGGTKFLAPGTPARFSGSLLGGKAALTLSGVQ |
| | | | PEDEAEYYCVLWYSNRWVFGGGTKLTVLGGGGDKTHTCPPCPAPELL |
| | | | GGPSVFLFPPKPKDTLMISRTPEVTCVVVDVSHEDPEVKFNWYVDGV |
| | | | EVHNAKTKPCEEQYGSTYRCVSVLTVLHQDWLNGKEYKCKVSNKALP |
| | | | APIEKTISKAKGQPREPQVYTLPPSREEMTKNQVSLTCLVKGFYPSD |
| | | | IAVEWESNGQPENNYKTTPPVLDSDGSFFLYSKLTVDKSRWQQGNVF |
| | | | SCSVMHEALHNHYTQKSLSLSPGKGGGGSGGGGSGGGGSGGGGSGGG |
| | | | GSGGGGSDKTHTCPPCPAPELLGGPSVFLFPPKPKDTLMISRTPEVT |
| | | | CVVVDVSHEDPEVKFNWYVDGVEVHNAKTKPCEEQYGSTYRCVSVLT |
| | | | VLHQDWLNGKEYKCKVSNKALPAPIEKTISKAKGQPREPQVYTLPPS |
| | | | REEMTKNQVSLTCLVKGFYPSDIAVEWESNGQPENNYKTTPPVLDSD |
| | | | GSFFLYSKLTVDKSRWQQGNVFSCSVMHEALHNHYTQKSLSLSPGK |
| 167. | PM_7_CCxCD3- | bispecific | QVQLVESGGGLVKPGESLRLSCAASGFTFSDYYMYWVRQAPGKCLEW |
| | scFc_delGK | HLE | VAIISDGGYYTYYSDIIKGRFTISRDNAKNSLYLQMNSLKAEDTAVY |
| | | molecule | YCARGFPLLRHGAMDYWGQGTLVTVSSGGGGSGGGGSGGGGSDIQMT |
| | | | QSPSSLSASVGDRVTITCKASQNVDTNVAWYQQKPGQAPKSLIYSAS |
| | | | YRYSDVPSRFSGSASGTDFTLTISSVQSEDFATYYCQQYDQQLITFG |
| | | | CGTKLEIKSGGGGSEVQLVESGGGLVQPGGSLKLSCAASGFTFNKYA |
| | | | MNWVRQAPGKGLEWVARIRSKYNNYATYYADSVKDRFTISRDDSKNT |
| | | | AYLQMNNLKTEDTAVYYCVRHGNFGNSYISYWAYWGQGTLVTVSSGG |
| | | | GGSGGGGSGGGGSQTVVTQEPSLTVSPGGTVTLTCGSSTGAVTSGNY |
| | | | PNWVQQKPGQAPRGLIGGTKFLAPGTPARFSGSLLGGKAALTLSGVQ |
| | | | PEDEAEYYCVLWYSNRWVFGGGTKLTVLGGGGDKTHTCPPCPAPELL |
| | | | GGPSVFLFPPKPKDTLMISRTPEVTCVVVDVSHEDPEVKFNWYVDGV |
| | | | EVHNAKTKPCEEQYGSTYRCVSVLTVLHQDWLNGKEYKCKVSNKALP |
| | | | APIEKTISKAKGQPREPQVYTLPPSREEMTKNQVSLTCLVKGFYPSD |
| | | | IAVEWESNGQPENNYKTTPPVLDSDGSFFLYSKLTVDKSRWQQGNVF |
| | | | SCSVMHEALHNHYTQKSLSLSPGGGGSGGGGSGGGGSGGGGSGGGGS |
| | | | GGGGSDKTHTCPPCPAPELLGGPSVFLFPPKPKDTLMISRTPEVTCV |
| | | | VVDVSHEDPEVKFNWYVDGVEVHNAKTKPCEEQYGSTYRCVSVLTVL |
| | | | HQDWLNGKEYKCKVSNKALPAPIEKTISKAKGQPREPQVYTLPPSRE |
| | | | EMTKNQVSLTCLVKGFYPSDIAVEWESNGQPENNYKTTPPVLDSDGS |
| | | | FFLYSKLTVDKSRWQQGNVFSCSVMHEALHNHYTQKSLSLSPGK |
| 168. | PM_8xCD3- | VH CDR1 | DYYMY |
| | ScFc | | |
| 169. | PM_8xCD3- | VH CDR2 | IISDGGYYTYYSDIIKG |
| | scFc | | |
| 170. | PM_8xCD3- | VH CDR3 | GFPLLRHGAMDY |
| | scFc | | |
| 171. | PM_8xCD3- | VL CDR1 | KASQNVDTNVA |
| | scFc | | |
| 172. | PM_8xCD3- | VL CDR2 | SASYRYS |
| | scFc | | |
| 173. | PM_8xCD3- | VL CDR3 | QQYDQVRLT |
| | scFc | | |
| 174. | PM_8xCD3- | VH | QVQLVESGGGLVKPGESLRLSCAASGFTFSDYYMYWVRQAPGKGLEW |
| | scFc | | VAIISDGGYYTYYSDIIKGRFTISRDNAKNSLYLQMNSLKAEDTAVY |
| | | | YCARGFPLLRHGAMDYWGQGTLVTVSS |
| 175. | PM_8xCD3- | VL | DIQMTQSPSSLSASVGDRVTITCKASQNVDTNVAWYQQKPGQAPKSL |
| | scFc | | IYSASYRYSDVPSRFSGSASGTDFTLTISSVQSEDFATYYCQQYDQV |
| | | | RLTFGGGTKLEIK |
| 176. | PM_8xCD3- | scFv | QVQLVESGGGLVKPGESLRLSCAASGFTFSDYYMYWVRQAPGKGLEW |
| | scFc | | VAIISDGGYYTYYSDIIKGRFTISRDNAKNSLYLQMNSLKAEDTAVY |
| | | | YCARGFPLLRHGAMDYWGQGTLVTVSSGGGGSGGGGSGGGGSDIQMT |
| | | | QSPSSLSASVGDRVTITCKASQNVDTNVAWYQQKPGQAPKSLIYSAS |
| | | | YRYSDVPSRFSGSASGTDFTLTISSVQSEDFATYYCQQYDQVRLTFG |
| | | | GGTKLEIK |
| 177. | PM_8xCD3- | bispecific | QVQLVESGGGLVKPGESLRLSCAASGFTFSDYYMYWVRQAPGKGLEW |
| | scFc | molecule | VAIISDGGYYTYYSDIIKGRFTISRDNAKNSLYLQMNSLKAEDTAVY |
| | | | YCARGFPLLRHGAMDYWGQGTLVTVSSGGGGSGGGGSGGGGSDIQMT |
| | | | QSPSSLSASVGDRVTITCKASQNVDTNVAWYQQKPGQAPKSLIYSAS |
| | | | YRYSDVPSRFSGSASGTDFTLTISSVQSEDFATYYCQQYDQVRLTFG |
| | | | GGTKLEIKSGGGGSEVQLVESGGGLVQPGGSLKLSCAASGFTFNKYA |
| | | | MNWVRQAPGKGLEWVARIRSKYNNYATYYADSVKDRFTISRDDSKNT |
| | | | AYLQMNNLKTEDTAVYYCVRHGNFGNSYISYWAYWGQGTLVTVSSGG |
| | | | GGSGGGGSGGGGSQTVVTQEPSLTVSPGGTVTLTCGSSTGAVTSGNY |
| | | | PNWVQQKPGQAPRGLIGGTKFLAPGTPARFSGSLLGGKAALTLSGVQ |
| | | | PEDEAEYYCVLWYSNRWVFGGGTKLTVL |
| 178. | PM_8xCD3- | bispecific | QVQLVESGGGLVKPGESLRLSCAASGFTFSDYYMYWVRQAPGKGLEW |
| | scFc | HLE | VAIISDGGYYTYYSDIIKGRFTISRDNAKNSLYLQMNSLKAEDTAVY |
| | | molecule | YCARGFPLLRHGAMDYWGQGTLVTVSSGGGGSGGGGSGGGGSDIQMT |
| | | | QSPSSLSASVGDRVTITCKASQNVDTNVAWYQQKPGQAPKSLIYSAS |
| | | | YRYSDVPSRFSGSASGTDFTLTISSVQSEDFATYYCQQYDQVRLTFG |
| | | | GGTKLEIKSGGGGSEVQLVESGGGLVQPGGSLKLSCAASGFTFNKYA |
| | | | MNWVRQAPGKGLEWVARIRSKYNNYATYYADSVKDRFTISRDDSKNT |
| | | | AYLQMNNLKTEDTAVYYCVRHGNFGNSYISYWAYWGQGTLVTVSSGG |
| | | | GGSGGGGSGGGGSQTVVTQEPSLTVSPGGTVTLTCGSSTGAVTSGNY |
| | | | PNWVQQKPGQAPRGLIGGTKFLAPGTPARFSGSLLGGKAALTLSGVQ |
| | | | PEDEAEYYCVLWYSNRWVFGGGTKLTVLGGGGDKTHTCPPCPAPELL |
| | | | GGPSVFLFPPKPKDTLMISRTPEVTCVVVDVSHEDPEVKFNWYVDGV |
| | | | EVHNAKTKPCEEQYGSTYRCVSVLTVLHQDWLNGKEYKCKVSNKALP |
| | | | APIEKTISKAKGQPREPQVYTLPPSREEMTKNQVSLTCLVKGFYPSD |
| | | | IAVEWESNGQPENNYKTTPPVLDSDGSFFLYSKLTVDKSRWQQGNVF |
| | | | SCSVMHEALHNHYTQKSLSLSPGKGGGGSGGGGSGGGGSGGGGSGGG |
| | | | GSGGGGSDKTHTCPPCPAPELLGGPSVFLFPPKPKDTLMISRTPEVT |
| | | | CVVVDVSHEDPEVKFNWYVDGVEVHNAKTKPCEEQYGSTYRCVSVLT |
| | | | VLHQDWLNGKEYKCKVSNKALPAPIEKTISKAKGQPREPQVYTLPPS |
| | | | REEMTKNQVSLTCLVKGFYPSDIAVEWESNGQPENNYKTTPPVLDSD |
| | | | GSFFLYSKLTVDKSRWQQGNVFSCSVMHEALHNHYTQKSLSLSPGK |
| 179. | PM_8xCD3- | bispecific | QVQLVESGGGLVKPGESLRLSCAASGFTFSDYYMYWVRQAPGKGLEW |
| | scFc_delGK | HLE | VAIISDGGYYTYYSDIIKGRFTISRDNAKNSLYLQMNSLKAEDTAVY |
| | | molecule | QGTLVTVSYCARGFPLLRHGAMDYWGSGGGGSGGGGSGGGGSDIQMT |
| | | | QSPSSLSASVGDRVTITCKASQNVDTNVAWYQQKPGQAPKSLIYSAS |
| | | | YRYSDVPSRFSGSASGTDFTLTISSVQSEDFATYYCQQYDQVRLTFG |
| | | | GGTKLEIKSGGGGSEVQLVESGGGLVQPGGSLKLSCAASGFTFNKYA |
| | | | MNWVRQAPGKGLEWVARIRSKYNNYATYYADSVKDRFTISRDDSKNT |
| | | | AYLQMNNLKTEDTAVYYCVRHGNFGNSYISYWAYWGQGTLVTVSSGG |
| | | | GGSGGGGSGGGGSQTVVTQEPSLTVSPGGTVTLTCGSSTGAVTSGNY |
| | | | PNWVQQKPGQAPRGLIGGTKFLAPGTPARFSGSLLGGKAALTLSGVQ |
| | | | PEDEAEYYCVLWYSNRWVFGGGTKLTVLGGGGDKTHTCPPCPAPELL |
| | | | GGPSVFLFPPKPKDTLMISRTPEVTCVVVDVSHEDPEVKFNWYVDGV |
| | | | EVHNAKTKPCEEQYGSTYRCVSVLTVLHQDWLNGKEYKCKVSNKALP |
| | | | APIEKTISKAKGQPREPQVYTLPPSREEMTKNQVSLTCLVKGFYPSD |
| | | | IAVEWESNGQPENNYKTTPPVLDSDGSFFLYSKLTVDKSRWQQGNVF |
| | | | SCSVMHEALHNHYTQKSLSLSPGGGGSGGGGSGGGGSGGGGSGGGGS |
| | | | GGGGSDKTHTCPPCPAPELLGGPSVFLFPPKPKDTLMISRTPEVTCV |
| | | | VVDVSHEDPEVKFNWYVDGVEVHNAKTKPCEEQYGSTYRCVSVLTVL |
| | | | HQDWLNGKEYKCKVSNKALPAPIEKTISKAKGQPREPQVYTLPPSRE |
| | | | EMTKNQVSLTCLVKGFYPSDIAVEWESNGQPENNYKTTPPVLDSDGS |
| | | | FFLYSKLTVDKSRWQQGNVFSCSVMHEALHNHYTQKSLSLSPGK |
| 180. | PM_8_CCxCD3- | VH | QVQLVESGGGLVKPGESLRLSCAASGFTFSDYYMYWVRQAPGKCLEW |
| | scFc | | VAIISDGGYYTYYSDIIKGRFTISRDNAKNSLYLQMNSLKAEDTAVY |
| | | | YCARGFPLLRHGAMDYWGQGTLVTVSS |
| 181. | PM_8_CCxCD3- | VL | DIQMTQSPSSLSASVGDRVTITCKASQNVDTNVAWYQQKPGQAPKSL |
| | scFc | | IYSASYRYSDVPSRFSGSASGTDFTLTISSVQSEDFATYYCQQYDQV |
| | | | RLTFGCGTKLEIK |
| 182. | PM_8_CCxCD3- | scFv | QVQLVESGGGLVKPGESLRLSCAASGFTFSDYYMYWVRQAPGKCLEW |
| | scFc | | VAIISDGGYYTYYSDIIKGRFTISRDNAKNSLYLQMNSLKAEDTAVY |
| | | | YCARGFPLLRHGAMDYWGQGTLVTVSSGGGGSGGGGSGGGGSDIQMT |
| | | | QSPSSLSASVGDRVTITCKASQNVDTNVAWYQQKPGQAPKSLIYSAS |
| | | | YRYSDVPSRFSGSASGTDFTLTISSVQSEDFATYYCQQYDQVRLTFG |
| | | | CGTKLEIK |
| 183. | PM_8_CCxCD3- | bispecific | QVQLVESGGGLVKPGESLRLSCAASGFTFSDYYMYWVRQAPGKCLEW |
| | scFc | molecule | VAIISDGGYYTYYSDIIKGRFTISRDNAKNSLYLQMNSLKAEDTAVY |
| | | | YCARGFPLLRHGAMDYWGQGTLVTVSSGGGGSGGGGSGGGGSDIQMT |
| | | | QSPSSLSASVGDRVTITCKASQNVDTNVAWYQQKPGQAPKSLIYSAS |
| | | | YRYSDVPSRFSGSASGTDFTLTISSVQSEDFATYYCQQYDQVRLTFG |
| | | | CGTKLEIKSGGGGSEVQLVESGGGLVQPGGSLKLSCAASGFTFNKYA |
| | | | MNWVRQAPGKGLEWVARIRSKYNNYATYYADSVKDRFTISRDDSKNT |
| | | | AYLQMNNLKTEDTAVYYCVRHGNFGNSYISYWAYWGQGTLVTVSSGG |
| | | | GGSGGGGSGGGGSQTVVTQEPSLTVSPGGTVTLTCGSSTGAVTSGNY |
| | | | PNWVQQKPGQAPRGLIGGTKFLAPGTPARFSGSLLGGKAALTLSGVQ |
| | | | PEDEAEYYCVLWYSNRWVFGGGTKLTVL |
| 184. | PM_8_CCxCD3- | bispecific | QVQLVESGGGLVKPGESLRLSCAASGFTFSDYYMYWVRQAPGKCLEW |
| | scFc | HLE | VAIISDGGYYTYYSDIIKGRFTISRDNAKNSLYLQMNSLKAEDTAVY |
| | | molecule | YCARGFPLLRHGAMDYWGQGTLVTVSSGGGGSGGGGSGGGGSDIQMT |
| | | | QSPSSLSASVGDRVTITCKASQNVDTNVAWYQQKPGQAPKSLIYSAS |
| | | | YRYSDVPSRFSGSASGTDFTLTISSVQSEDFATYYCQQYDQVRLTFG |
| | | | CGTKLEIKSGGGGSEVQLVESGGGLVQPGGSLKLSCAASGFTFNKYA |
| | | | MNWVRQAPGKGLEWVARIRSKYNNYATYYADSVKDRFTISRDDSKNT |
| | | | AYLQMNNLKTEDTAVYYCVRHGNFGNSYISYWAYWGQGTLVTVSSGG |
| | | | GGSGGGGSGGGGSQTVVTQEPSLTVSPGGTVTLTCGSSTGAVTSGNY |
| | | | PNWVQQKPGQAPRGLIGGTKFLAPGTPARFSGSLLGGKAALTLSGVQ |
| | | | PEDEAEYYCVLWYSNRWVFGGGTKLTVLGGGGDKTHTCPPCPAPELL |
| | | | GGPSVFLFPPKPKDTLMISRTPEVTCVVVDVSHEDPEVKFNWYVDGV |
| | | | EVHNAKTKPCEEQYGSTYRCVSVLTVLHQDWLNGKEYKCKVSNKALP |
| | | | APIEKTISKAKGQPREPQVYTLPPSREEMTKNQVSLTCLVKGFYPSD |
| | | | IAVEWESNGQPENNYKTTPPVLDSDGSFFLYSKLTVDKSRWQQGNVF |
| | | | SCSVMHEALHNHYTQKSLSLSPGKGGGGSGGGGSGGGGSGGGGSGGG |
| | | | GSGGGGSDKTHTCPPCPAPELLGGPSVFLFPPKPKDTLMISRTPEVT |
| | | | CVVVDVSHEDPEVKFNWYVDGVEVHNAKTKPCEEQYGSTYRCVSVLT |
| | | | VLHQDWLNGKEYKCKVSNKALPAPIEKTISKAKGQPREPQVYTLPPS |
| | | | REEMTKNQVSLTCLVKGFYPSDIAVEWESNGQPENNYKTTPPVLDSD |
| | | | GSFFLYSKLTVDKSRWQQGNVFSCSVMHEALHNHYTQKSLSLSPGK |
| 185. | PM_8_CCxCD3- | bispecific | QVQLVESGGGLVKPGESLRLSCAASGFTFSDYYMYWVRQAPGKCLEW |
| | scFc_delGK | HLE | VAIISDGGYYTYYSDIIKGRFTISRDNAKNSLYLQMNSLKAEDTAVY |
| | | molecule | YCARGFPLLRHGAMDYWGQGTLVTVSSGGGGSGGGGSGGGGSDIQMT |
| | | | QSPSSLSASVGDRVTITCKASQNVDTNVAWYQQKPGQAPKSLIYSAS |
| | | | YRYSDVPSRFSGSASGTDFTLTISSVQSEDFATYYCQQYDQVRLTFG |
| | | | CGTKLEIKSGGGGSEVQLVESGGGLVQPGGSLKLSCAASGFTFNKYA |
| | | | MNWVRQAPGKGLEWVARIRSKYNNYATYYADSVKDRFTISRDDSKNT |
| | | | AYLQMNNLKTEDTAVYYCVRHGNFGNSYISYWAYWGQGTLVTVSSGG |
| | | | GGSGGGGSGGGGSQTVVTQEPSLTVSPGGTVTLTCGSSTGAVTSGNY |
| | | | PNWVQQKPGQAPRGLIGGTKFLAPGTPARFSGSLLGGKAALTLSGVQ |
| | | | PEDEAEYYCVLWYSNRWVFGGGTKLTVLGGGGDKTHTCPPCPAPELL |
| | | | GGPSVFLFPPKPKDTLMISRTPEVTCVVVDVSHEDPEVKFNWYVDGV |
| | | | EVHNAKTKPCEEQYGSTYRCVSVLTVLHQDWLNGKEYKCKVSNKALP |
| | | | APIEKTISKAKGQPREPQVYTLPPSREEMTKNQVSLTCLVKGFYPSD |
| | | | IAVEWESNGQPENNYKTTPPVLDSDGSFFLYSKLTVDKSRWQQGNVF |
| | | | SCSVMHEALHNHYTQKSLSLSPGGGGSGGGGSGGGGSGGGGSGGGGS |
| | | | GGGGSDKTHTCPPCPAPELLGGPSVFLFPPKPKDTLMISRTPEVTCV |
| | | | VVDVSHEDPEVKFNWYVDGVEVHNAKTKPCEEQYGSTYRCVSVLTVL |
| | | | HQDWLNGKEYKCKVSNKALPAPIEKTISKAKGQPREPQVYTLPPSRE |
| | | | EMTKNQVSLTCLVKGFYPSDIAVEWESNGQPENNYKTTPPVLDSDGS |
| | | | FFLYSKLTVDKSRWQQGNVFSCSVMHEALHNHYTQKSLSLSPGK |
| 186. | PM_9xCD3- | VH CDR1 | DYYMN |
| | scFc | | |
| 187. | PM_9xCD3- | VH CDR2 | IISDGGYYTYYSDIIKG |
| | scFc | | |
| 188. | PM_9xCD3- | VH CDR3 | GFPLLRHGAMDY |
| | scFc | | |
| 189. | PM_9xCD3- | VL CDR1 | KASQNVDTNVA |
| | scFc | | |
| 190. | PM_9xCD3- | VL CDR2 | SASYRYS |
| | scFc | | |
| 191. | PM_9xCD3- | VL CDR3 | QQYDDLRPT |
| | scFc | | |
| 192. | PM_9xCD3- | VH | QVQLVESGGGLVKPGESLRLSCAASGFTFSDYYMNWVRQAPGKGLEW |
| | scFc | | VAIISDGGYYTYYSDIIKGRFTISRDNAKNSLYLQMNSLKAEDTAVY |
| | | | YCARGFPLLRHGAMDYWGQGTLVTVSS |
| 193. | PM_9xCD3- | VL | DIQMTQSPSSLSASVGDRVTITCKASQNVDTNVAWYQQKPGQAPKSL |
| | scFc | | IYSASYRYSDVPSRFSGSASGTDFTLTISSLQSEDFATYYCQQYDDL |
| | | | RPTFGGGTKLEIK |
| 194. | PM_9xCD3- | scFv | QVQLVESGGGLVKPGESLRLSCAASGFTFSDYYMNWVRQAPGKGLEW |
| | scFc | | VAIISDGGYYTYYSDIIKGRFTISRDNAKNSLYLQMNSLKAEDTAVY |
| | | | YCARGFPLLRHGAMDYWGQGTLVTVSSGGGGSGGGGSGGGGSDIQMT |
| | | | QSPSSLSASVGDRVTITCKASQNVDTNVAWYQQKPGQAPKSLIYSAS |
| | | | YRYSDVPSRFSGSASGTDFTLTISSLQSEDFATYYCQQYDDLRPTFG |
| | | | GGTKLEIK |
| 195. | PM_9xCD3- | bispecific | QVQLVESGGGLVKPGESLRLSCAASGFTFSDYYMNWVRQAPGKGLEW |
| | scFc | molecule | VAIISDGGYYTYYSDIIKGRFTISRDNAKNSLYLQMNSLKAEDTAVY |
| | | | YCARGFPLLRHGAMDYWGQGTLVTVSSGGGGSGGGGSGGGGSDIQMT |
| | | | QSPSSLSASVGDRVTITCKASQNVDTNVAWYQQKPGQAPKSLIYSAS |
| | | | YRYSDVPSRFSGSASGTDFTLTISSLQSEDFATYYCQQYDDLRPTFG |
| | | | GGTKLEIKSGGGGSEVQLVESGGGLVQPGGSLKLSCAASGFTFNKYA |
| | | | MNWVRQAPGKGLEWVARIRSKYNNYATYYADSVKDRFTISRDDSKNT |
| | | | AYLQMNNLKTEDTAVYYCVRHGNFGNSYISYWAYWGQGTLVTVSSGG |
| | | | GGSGGGGSGGGGSQTVVTQEPSLTVSPGGTVTLTCGSSTGAVTSGNY |
| | | | PNWVQQKPGQAPRGLIGGTKFLAPGTPARFSGSLLGGKAALTLSGVQ |
| | | | PEDEAEYYCVLWYSNRWVFGGGTKLTVL |
| 196. | PM_9xCD3- | bispecific | QVQLVESGGGLVKPGESLRLSCAASGFTFSDYYMNWVRQAPGKGLEW |
| | scFc | HLE | VAIISDGGYYTYYSDIIKGRFTISRDNAKNSLYLQMNSLKAEDTAVY |
| | | molecule | YCARGFPLLRHGAMDYWGQGTLVTVSSGGGGSGGGGSGGGGSDIQMT |
| | | | QSPSSLSASVGDRVTITCKASQNVDTNVAWYQQKPGQAPKSLIYSAS |
| | | | YRYSDVPSRFSGSASGTDFTLTISSLQSEDFATYYCQQYDDLRPTFG |
| | | | GGTKLEIKSGGGGSEVQLVESGGGLVQPGGSLKLSCAASGFTFNKYA |
| | | | MNWVRQAPGKGLEWVARIRSKYNNYATYYADSVKDRFTISRDDSKNT |
| | | | AYLQMNNLKTEDTAVYYCVRHGNFGNSYISYWAYWGQGTLVTVSSGG |
| | | | GGSGGGGSGGGGSQTVVTQEPSLTVSPGGTVTLTCGSSTGAVTSGNY |
| | | | PNWVQQKPGQAPRGLIGGTKFLAPGTPARFSGSLLGGKAALTLSGVQ |
| | | | PEDEAEYYCVLWYSNRWVFGGGTKLTVLGGGGDKTHTCPPCPAPELL |
| | | | GGPSVFLFPPKPKDTLMISRTPEVTCVVVDVSHEDPEVKFNWYVDGV |
| | | | EVHNAKTKPCEEQYGSTYRCVSVLTVLHQDWLNGKEYKCKVSNKALP |
| | | | APIEKTISKAKGQPREPQVYTLPPSREEMTKNQVSLTCLVKGFYPSD |
| | | | IAVEWESNGQPENNYKTTPPVLDSDGSFFLYSKLTVDKSRWQQGNVF |
| | | | SCSVMHEALHNHYTQKSLSLSPGKGGGGSGGGGSGGGGSGGGGSGGG |
| | | | GSGGGGSDKTHTCPPCPAPELLGGPSVFLFPPKPKDTLMISRTPEVT |
| | | | CVVVDVSHEDPEVKFNWYVDGVEVHNAKTKPCEEQYGSTYRCVSVLT |
| | | | VLHQDWLNGKEYKCKVSNKALPAPIEKTISKAKGQPREPQVYTLPPS |
| | | | REEMTKNQVSLTCLVKGFYPSDIAVEWESNGQPENNYKTTPPVLDSD |
| | | | GSFFLYSKLTVDKSRWQQGNVFSCSVMHEALHNHYTQKSLSLSPGK |
| 197. | PM_9xCD3- | bispecific | QVQLVESGGGLVKPGESLRLSCAASGFTFSDYYMNWVRQAPGKGLEW |
| | scFc_delGK | HLE | VAIISDGGYYTYYSDIIKGRFTISRDNAKNSLYLQMNSLKAEDTAVY |
| | | molecule | YCARGFPLLRHGAMDYWGQGTLVTVSSGGGGSGGGGSGGGGSDIQMT |
| | | | QSPSSLSASVGDRVTITCKASQNVDTNVAWYQQKPGQAPKSLIYSAS |
| | | | YRYSDVPSRFSGSASGTDFTLTISSLQSEDFATYYCQQYDDLRPTFG |
| | | | GGTKLEIKSGGGGSEVQLVESGGGLVQPGGSLKLSCAASGFTFNKYA |
| | | | MNWVRQAPGKGLEWVARIRSKYNNYATYYADSVKDRFTISRDDSKNT |
| | | | AYLQMNNLKTEDTAVYYCVRHGNFGNSYISYWAYWGQGTLVTVSSGG |
| | | | GGSGGGGSGGGGSQTVVTQEPSLTVSPGGTVTLTCGSSTGAVTSGNY |
| | | | PNWVQQKPGQAPRGLIGGTKFLAPGTPARFSGSLLGGKAALTLSGVQ |
| | | | PEDEAEYYCVLWYSNRWVFGGGTKLTVLGGGGDKTHTCPPCPAPELL |
| | | | GGPSVFLFPPKPKDTLMISRTPEVTCVVVDVSHEDPEVKFNWYVDGV |
| | | | EVHNAKTKPCEEQYGSTYRCVSVLTVLHQDWLNGKEYKCKVSNKALP |
| | | | APIEKTISKAKGQPREPQVYTLPPSREEMTKNQVSLTCLVKGFYPSD |
| | | | IAVEWESNGQPENNYKTTPPVLDSDGSFFLYSKLTVDKSRWQQGNVF |
| | | | SCSVMHEALHNHYTQKSLSLSPGGGGSGGGGSGGGGSGGGGSGGGGS |
| | | | GGGGSDKTHTCPPCPAPELLGGPSVFLFPPKPKDTLMISRTPEVTCV |
| | | | VVDVSHEDPEVKFNWYVDGVEVHNAKTKPCEEQYGSTYRCVSVLTVL |
| | | | HQDWLNGKEYKCKVSNKALPAPIEKTISKAKGQPREPQVYTLPPSRE |
| | | | EMTKNQVSLTCLVKGFYPSDIAVEWESNGQPENNYKTTPPVLDSDGS |
| | | | FFLYSKLTVDKSRWQQGNVFSCSVMHEALHNHYTQKSLSLSPGK |
| 198. | PM_9_CCxCD3- | VH | QVQLVESGGGLVKPGESLRLSCAASGFTFSDYYMNWVRQAPGKCLEW |
| | scFc | | VAIISDGGYYTYYSDIIKGRFTISRDNAKNSLYLQMNSLKAEDTAVY |
| | | | YCARGFPLLRHGAMDYWGQGTLVTVSS |
| 199. | PM_9_CCxCD3- | VL | DIQMTQSPSSLSASVGDRVTITCKASQNVDTNVAWYQQKPGQAPKSL |
| | scFc | | IYSASYRYSDVPSRFSGSASGTDFTLTISSLQSEDFATYYCQQYDDL |
| | | | RPTFGCGTKLEIK |
| 200. | PM_9_CCxCD3- | scFv | QVQLVESGGGLVKPGESLRLSCAASGFTFSDYYMNWVRQAPGKCLEW |
| | scFc | | VAIISDGGYYTYYSDIIKGRFTISRDNAKNSLYLQMNSLKAEDTAVY |
| | | | YCARGFPLLRHGAMDYWGQGTLVTVSSGGGGSGGGGSGGGGSDIQMT |
| | | | QSPSSLSASVGDRVTITCKASQNVDTNVAWYQQKPGQAPKSLIYSAS |
| | | | YRYSDVPSRFSGSASGTDFTLTISSLQSEDFATYYCQQYDDLRPTFG |
| | | | CGTKLEIK |
| 201. | PM_9_CCxCD3- | bispecific | QVQLVESGGGLVKPGESLRLSCAASGFTFSDYYMNWVRQAPGKCLEW |
| | scFc | molecule | VAIISDGGYYTYYSDIIKGRFTISRDNAKNSLYLQMNSLKAEDTAVY |
| | | | YCARGFPLLRHGAMDYWGQGTLVTVSSGGGGSGGGGSGGGGSDIQMT |
| | | | QSPSSLSASVGDRVTITCKASQNVDTNVAWYQQKPGQAPKSLIYSAS |
| | | | YRYSDVPSRFSGSASGTDFTLTISSLQSEDFATYYCQQYDDLRPTFG |
| | | | CGTKLEIKSGGGGSEVQLVESGGGLVQPGGSLKLSCAASGFTFNKYA |
| | | | MNWVRQAPGKGLEWVARIRSKYNNYATYYADSVKDRFTISRDDSKNT |
| | | | AYLQMNNLKTEDTAVYYCVRHGNFGNSYISYWAYWGQGTLVTVSSGG |
| | | | GGSGGGGSGGGGSQTVVTQEPSLTVSPGGTVTLTCGSSTGAVTSGNY |
| | | | PNWVQQKPGQAPRGLIGGTKFLAPGTPARFSGSLLGGKAALTLSGVQ |
| | | | PEDEAEYYCVLWYSNRWVFGGGTKLTVL |
| 202. | PM_9_CCxCD3- | bispecific | QVQLVESGGGLVKPGESLRLSCAASGFTFSDYYMNWVRQAPGKCLEW |
| | scFc | HLE | VAIISDGGYYTYYSDIIKGRFTISRDNAKNSLYLQMNSLKAEDTAVY |
| | | molecule | YCARGFPLLRHGAMDYWGQGTLVTVSSGGGGSGGGGSGGGGSDIQMT |
| | | | QSPSSLSASVGDRVTITCKASQNVDTNVAWYQQKPGQAPKSLIYSAS |
| | | | YRYSDVPSRFSGSASGTDFTLTISSLQSEDFATYYCQQYDDLRPTFG |
| | | | CGTKLEIKSGGGGSEVQLVESGGGLVQPGGSLKLSCAASGFTFNKYA |
| | | | MNWVRQAPGKGLEWVARIRSKYNNYATYYADSVKDRFTISRDDSKNT |
| | | | AYLQMNNLKTEDTAVYYCVRHGNFGNSYISYWAYWGQGTLVTVSSGG |
| | | | GGSGGGGSGGGGSQTVVTQEPSLTVSPGGTVTLTCGSSTGAVTSGNY |
| | | | PNWVQQKPGQAPRGLIGGTKFLAPGTPARFSGSLLGGKAALTLSGVQ |
| | | | PEDEAEYYCVLWYSNRWVFGGGTKLTVLGGGGDKTHTCPPCPAPELL |
| | | | GGPSVFLFPPKPKDTLMISRTPEVTCVVVDVSHEDPEVKFNWYVDGV |
| | | | EVHNAKTKPCEEQYGSTYRCVSVLTVLHQDWLNGKEYKCKVSNKALP |
| | | | APIEKTISKAKGQPREPQVYTLPPSREEMTKNQVSLTCLVKGFYPSD |
| | | | IAVEWESNGQPENNYKTTPPVLDSDGSFFLYSKLTVDKSRWQQGNVF |
| | | | SCSVMHEALHNHYTQKSLSLSPGKGGGGSGGGGSGGGGSGGGGSGGG |
| | | | GSGGGGSDKTHTCPPCPAPELLGGPSVFLFPPKPKDTLMISRTPEVT |
| | | | CVVVDVSHEDPEVKFNWYVDGVEVHNAKTKPCEEQYGSTYRCVSVLT |
| | | | VLHQDWLNGKEYKCKVSNKALPAPIEKTISKAKGQPREPQVYTLPPS |
| | | | REEMTKNQVSLTCLVKGFYPSDIAVEWESNGQPENNYKTTPPVLDSD |
| | | | GSFFLYSKLTVDKSRWQQGNVFSCSVMHEALHNHYTQKSLSLSPGK |
| 203. | PM_9_CCxCD3- | bispecific | QVQLVESGGGLVKPGESLRLSCAASGFTFSDYYMNWVRQAPGKCLEW |
| | scFc_delGK | HLE | VAIISDGGYYTYYSDIIKGRFTISRDNAKNSLYLQMNSLKAEDTAVY |
| | | molecule | YCARGFPLLRHGAMDYWGQGTLVTVSSGGGGSGGGGSGGGGSDIQMT |
| | | | QSPSSLSASVGDRVTITCKASQNVDTNVAWYQQKPGQAPKSLIYSAS |
| | | | YRYSDVPSRFSGSASGTDFTLTISSLQSEDFATYYCQQYDDLRPTFG |
| | | | CGTKLEIKSGGGGSEVQLVESGGGLVQPGGSLKLSCAASGFTFNKYA |
| | | | MNWVRQAPGKGLEWVARIRSKYNNYATYYADSVKDRFTISRDDSKNT |
| | | | AYLQMNNLKTEDTAVYYCVRHGNFGNSYISYWAYWGQGTLVTVSSGG |
| | | | GGSGGGGSGGGGSQTVVTQEPSLTVSPGGTVTLTCGSSTGAVTSGNY |
| | | | PNWVQQKPGQAPRGLIGGTKFLAPGTPARFSGSLLGGKAALTLSGVQ |
| | | | PEDEAEYYCVLWYSNRWVFGGGTKLTVLGGGGDKTHTCPPCPAPELL |
| | | | GGPSVFLFPPKPKDTLMISRTPEVTCVVVDVSHEDPEVKFNWYVDGV |
| | | | EVHNAKTKPCEEQYGSTYRCVSVLTVLHQDWLNGKEYKCKVSNKALP |
| | | | APIEKTISKAKGQPREPQVYTLPPSREEMTKNQVSLTCLVKGFYPSD |
| | | | IAVEWESNGQPENNYKTTPPVLDSDGSFFLYSKLTVDKSRWQQGNVF |
| | | | SCSVMHEALHNHYTQKSLSLSPGGGGSGGGGSGGGGSGGGGSGGGGS |
| | | | GGGGSDKTHTCPPCPAPELLGGPSVFLFPPKPKDTLMISRTPEVTCV |
| | | | VVDVSHEDPEVKFNWYVDGVEVHNAKTKPCEEQYGSTYRCVSVLTVL |
| | | | HQDWLNGKEYKCKVSNKALPAPIEKTISKAKGQPREPQVYTLPPSRE |
| | | | EMTKNQVSLTCLVKGFYPSDIAVEWESNGQPENNYKTTPPVLDSDGS |
| | | | FFLYSKLTVDKSRWQQGNVFSCSVMHEALHNHYTQKSLSLSPGK |
| 204. | PM_10xCD3- | VH CDR1 | DYYMY |
| | scFc | | |
| 205. | PM_10xCD3- | VH CDR2 | IISDHHHWTYYSDIIKG |
| | scFc | | |
| 206. | PM_10xCD3- | VH CDR3 | GFPLLRHGAMDY |
| | scFc | | |
| 207. | PM_10xCD3- | VL CDR1 | KASQNVDTNVA |
| | scFc | | |
| 208. | PM_10xCD3- | VL CDR2 | SASYRYS |
| | scFc | | |
| 209. | PM_10xCD3- | VL CDR3 | QQYDSYPYT |
| | scFc | | |
| 210. | PM_10xCD3- | VH | QVQLVESGGGLVKPGESLRLSCAASGFTFSDYYMYWVRQAPGKGLEW |
| | scFc | | VAIISDHHHWTYYSDIIKGRFTISRDNAKNSLYLQMNSLKAEDTAVY |
| | | | YCARGFPLLRHGAMDYWGQGTLVTVSS |
| 211. | PM_10xCD3- | VL | DIQMTQSPSSLSASVGDRVTITCKASQNVDTNVAWYQQKPGQAPKSL |
| | scFc | | IYSASYRYSDVPSRFSGSASGTDFTLTISSVQSEDFATYYCQQYDSY |
| | | | PYTFGGGTKLEIK |
| 212. | PM_10xCD3- | scFv | QVQLVESGGGLVKPGESLRLSCAASGFTFSDYYMYWVRQAPGKGLEW |
| | scFc | | VAIISDHHHWTYYSDIIKGRFTISRDNAKNSLYLQMNSLKAEDTAVY |
| | | | YCARGFPLLRHGAMDYWGQGTLVTVSSGGGGSGGGGSGGGGSDIQMT |
| | | | QSPSSLSASVGDRVTITCKASQNVDTNVAWYQQKPGQAPKSLIYSAS |
| | | | YRYSDVPSRFSGSASGTDFTLTISSVQSEDFATYYCQQYDSYPYTFG |
| | | | GGTKLEIK |
| 213. | PM_10xCD3- | bispecific | QVQLVESGGGLVKPGESLRLSCAASGFTFSDYYMYWVRQAPGKGLEW |
| | scFc | molecule | VAIISDHHHWTYYSDIIKGRFTISRDNAKNSLYLQMNSLKAEDTAVY |
| | | | YCARGFPLLRHGAMDYWGQGTLVTVSSGGGGSGGGGSGGGGSDIQMT |
| | | | QSPSSLSASVGDRVTITCKASQNVDTNVAWYQQKPGQAPKSLIYSAS |
| | | | YRYSDVPSRFSGSASGTDFTLTISSVQSEDFATYYCQQYDSYPYTFG |
| | | | GGTKLEIKSGGGGSEVQLVESGGGLVQPGGSLKLSCAASGFTFNKYA |
| | | | MNWVRQAPGKGLEWVARIRSKYNNYATYYADSVKDRFTISRDDSKNT |
| | | | AYLQMNNLKTEDTAVYYCVRHGNFGNSYISYWAYWGQGTLVTVSSGG |
| | | | GGSGGGGSGGGGSQTVVTQEPSLTVSPGGTVTLTCGSSTGAVTSGNY |
| | | | PNWVQQKPGQAPRGLIGGTKFLAPGTPARFSGSLLGGKAALTLSGVQ |
| | | | PEDEAEYYCVLWYSNRWVFGGGTKLTVL |
| 214. | PM_10xCD3- | bispecific | QVQLVESGGGLVKPGESLRLSCAASGFTFSDYYMYWVRQAPGKGLEW |
| | scFc | HLE | VAIISDHHHWTYYSDIIKGRFTISRDNAKNSLYLQMNSLKAEDTAVY |
| | | molecule | YCARGFPLLRHGAMDYWGQGTLVTVSSGGGGSGGGGSGGGGSDIQMT |
| | | | QSPSSLSASVGDRVTITCKASQNVDTNVAWYQQKPGQAPKSLIYSAS |
| | | | YRYSDVPSRFSGSASGTDFTLTISSVQSEDFATYYCQQYDSYPYTFG |
| | | | GGTKLEIKSGGGGSEVQLVESGGGLVQPGGSLKLSCAASGFTFNKYA |
| | | | MNWVRQAPGKGLEWVARIRSKYNNYATYYADSVKDRFTISRDDSKNT |
| | | | AYLQMNNLKTEDTAVYYCVRHGNFGNSYISYWAYWGQGTLVTVSSGG |
| | | | GGSGGGGSGGGGSQTVVTQEPSLTVSPGGTVTLTCGSSTGAVTSGNY |
| | | | PNWVQQKPGQAPRGLIGGTKFLAPGTPARFSGSLLGGKAALTLSGVQ |
| | | | PEDEAEYYCVLWYSNRWVFGGGTKLTVLGGGGDKTHTCPPCPAPELL |
| | | | GGPSVFLFPPKPKDTLMISRTPEVTCVVVDVSHEDPEVKFNWYVDGV |
| | | | EVHNAKTKPCEEQYGSTYRCVSVLTVLHQDWLNGKEYKCKVSNKALP |
| | | | APIEKTISKAKGQPREPQVYTLPPSREEMTKNQVSLTCLVKGFYPSD |
| | | | IAVEWESNGQPENNYKTTPPVLDSDGSFFLYSKLTVDKSRWQQGNVF |
| | | | SCSVMHEALHNHYTQKSLSLSPGKGGGGSGGGGSGGGGSGGGGSGGG |
| | | | GSGGGGSDKTHTCPPCPAPELLGGPSVFLFPPKPKDTLMISRTPEVT |
| | | | CVVVDVSHEDPEVKFNWYVDGVEVHNAKTKPCEEQYGSTYRCVSVLT |
| | | | VLHQDWLNGKEYKCKVSNKALPAPIEKTISKAKGQPREPQVYTLPPS |
| | | | REEMTKNQVSLTCLVKGFYPSDIAVEWESNGQPENNYKTTPPVLDSD |
| | | | GSFFLYSKLTVDKSRWQQGNVFSCSVMHEALHNHYTQKSLSLSPGK |
| 215. | PM_10xCD3- | bispecific | QVQLVESGGGLVKPGESLRLSCAASGFTFSDYYMYWVRQAPGKGLEW |
| | scFc_delGK | HLE | VAIISDHHHWTYYSDIIKGRFTISRDNAKNSLYLQMNSLKAEDTAVY |
| | | molecule | YCARGFPLLRHGAMDYWGQGTLVTVSSGGGGSGGGGSGGGGSDIQMT |
| | | | QSPSSLSASVGDRVTITCKASQNVDTNVAWYQQKPGQAPKSLIYSAS |
| | | | YRYSDVPSRFSGSASGTDFTLTISSVQSEDFATYYCQQYDSYPYTFG |
| | | | GGTKLEIKSGGGGSEVQLVESGGGLVQPGGSLKLSCAASGFTFNKYA |
| | | | MNWVRQAPGKGLEWVARIRSKYNNYATYYADSVKDRFTISRDDSKNT |
| | | | AYLQMNNLKTEDTAVYYCVRHGNFGNSYISYWAYWGQGTLVTVSSGG |
| | | | GGSGGGGSGGGGSQTVVTQEPSLTVSPGGTVTLTCGSSTGAVTSGNY |
| | | | PNWVQQKPGQAPRGLIGGTKFLAPGTPARFSGSLLGGKAALTLSGVQ |
| | | | PEDEAEYYCVLWYSNRWVFGGGTKLTVLGGGGDKTHTCPPCPAPELL |
| | | | GGPSVFLFPPKPKDTLMISRTPEVTCVVVDVSHEDPEVKFNWYVDGV |
| | | | EVHNAKTKPCEEQYGSTYRCVSVLTVLHQDWLNGKEYKCKVSNKALP |
| | | | APIEKTISKAKGQPREPQVYTLPPSREEMTKNQVSLTCLVKGFYPSD |
| | | | IAVEWESNGQPENNYKTTPPVLDSDGSFFLYSKLTVDKSRWQQGNVF |
| | | | SCSVMHEALHNHYTQKSLSLSPGGGGSGGGGSGGGGSGGGGSGGGGS |
| | | | GGGGSDKTHTCPPCPAPELLGGPSVFLFPPKPKDTLMISRTPEVTCV |
| | | | VVDVSHEDPEVKFNWYVDGVEVHNAKTKPCEEQYGSTYRCVSVLTVL |
| | | | HQDWLNGKEYKCKVSNKALPAPIEKTISKAKGQPREPQVYTLPPSRE |
| | | | EMTKNQVSLTCLVKGFYPSDIAVEWESNGQPENNYKTTPPVLDSDGS |
| | | | FFLYSKLTVDKSRWQQGNVFSCSVMHEALHNHYTQKSLSLSPGK |
| 216. | PM_10_CCxCD3- | VH | QVQLVESGGGLVKPGESLRLSCAASGFTFSDYYMYWVRQAPGKCLEW |
| | scFc | | VAIISDHHHWTYYSDIIKGRFTISRDNAKNSLYLQMNSLKAEDTAVY |
| | | | YCARGFPLLRHGAMDYWGQGTLVTVSS |
| 217. | PM_10_CCxCD3- | VL | DIQMTQSPSSLSASVGDRVTITCKASQNVDTNVAWYQQKPGQAPKSL |
| | scFc | | IYSASYRYSDVPSRFSGSASGTDFTLTISSVQSEDFATYYCQQYDSY |
| | | | PYTFGCGTKLEIK |
| 218. | PM_10_CCxCD3- | scFv | QVQLVESGGGLVKPGESLRLSCAASGFTFSDYYMYWVRQAPGKCLEW |
| | scFc | | VAIISDHHHWTYYSDIIKGRFTISRDNAKNSLYLQMNSLKAEDTAVY |
| | | | YCARGFPLLRHGAMDYWGQGTLVTVSSGGGGSGGGGSGGGGSDIQMT |
| | | | QSPSSLSASVGDRVTITCKASQNVDTNVAWYQQKPGQAPKSLIYSAS |
| | | | YRYSDVPSRFSGSASGTDFTLTISSVQSEDFATYYCQQYDSYPYTFG |
| | | | CGTKLEIK |
| 219. | PM_10_CCxCD3- | bispecific | QVQLVESGGGLVKPGESLRLSCAASGFTFSDYYMYWVRQAPGKCLEW |
| | scFc | molecule | VAIISDHHHWTYYSDIIKGRFTISRDNAKNSLYLQMNSLKAEDTAVY |
| | | | YCARGFPLLRHGAMDYWGQGTLVTVSSGGGGSGGGGSGGGGSDIQMT |
| | | | QSPSSLSASVGDRVTITCKASQNVDTNVAWYQQKPGQAPKSLIYSAS |
| | | | YRYSDVPSRFSGSASGTDFTLTISSVQSEDFATYYCQQYDSYPYTFG |
| | | | CGTKLEIKSGGGGSEVQLVESGGGLVQPGGSLKLSCAASGFTFNKYA |
| | | | MNWVRQAPGKGLEWVARIRSKYNNYATYYADSVKDRFTISRDDSKNT |
| | | | AYLQMNNLKTEDTAVYYCVRHGNFGNSYISYWAYWGQGTLVTVSSGG |
| | | | GGSGGGGSGGGGSQTVVTQEPSLTVSPGGTVTLTCGSSTGAVTSGNY |
| | | | PNWVQQKPGQAPRGLIGGTKFLAPGTPARFSGSLLGGKAALTLSGVQ |
| | | | PEDEAEYYCVLWYSNRWVFGGGTKLTVL |
| 220. | PM_10_CCxCD3- | bispecific | QVQLVESGGGLVKPGESLRLSCAASGFTFSDYYMYWVRQAPGKCLEW |
| | scFc | HLE | VAIISDHHHWTYYSDIIKGRFTISRDNAKNSLYLQMNSLKAEDTAVY |
| | | molecule | YCARGFPLLRHGAMDYWGQGTLVTVSSGGGGSGGGGSGGGGSDIQMT |
| | | | QSPSSLSASVGDRVTITCKASQNVDTNVAWYQQKPGQAPKSLIYSAS |
| | | | YRYSDVPSRFSGSASGTDFTLTISSVQSEDFATYYCQQYDSYPYTFG |
| | | | CGTKLEIKSGGGGSEVQLVESGGGLVQPGGSLKLSCAASGFTFNKYA |
| | | | MNWVRQAPGKGLEWVARIRSKYNNYATYYADSVKDRFTISRDDSKNT |
| | | | AYLQMNNLKTEDTAVYYCVRHGNFGNSYISYWAYWGQGTLVTVSSGG |
| | | | GGSGGGGSGGGGSQTVVTQEPSLTVSPGGTVTLTCGSSTGAVTSGNY |
| | | | PNWVQQKPGQAPRGLIGGTKFLAPGTPARFSGSLLGGKAALTLSGVQ |
| | | | PEDEAEYYCVLWYSNRWVFGGGTKLTVLGGGGDKTHTCPPCPAPELL |
| | | | GGPSVFLFPPKPKDTLMISRTPEVTCVVVDVSHEDPEVKFNWYVDGV |
| | | | EVHNAKTKPCEEQYGSTYRCVSVLTVLHQDWLNGKEYKCKVSNKALP |
| | | | APIEKTISKAKGQPREPQVYTLPPSREEMTKNQVSLTCLVKGFYPSD |
| | | | IAVEWESNGQPENNYKTTPPVLDSDGSFFLYSKLTVDKSRWQQGNVF |
| | | | SCSVMHEALHNHYTQKSLSLSPGKGGGGSGGGGSGGGGSGGGGSGGG |
| | | | GSGGGGSDKTHTCPPCPAPELLGGPSVFLFPPKPKDTLMISRTPEVT |
| | | | CVVVDVSHEDPEVKFNWYVDGVEVHNAKTKPCEEQYGSTYRCVSVLT |
| | | | VLHQDWLNGKEYKCKVSNKALPAPIEKTISKAKGQPREPQVYTLPPS |
| | | | REEMTKNQVSLTCLVKGFYPSDIAVEWESNGQPENNYKTTPPVLDSD |
| | | | GSFFLYSKLTVDKSRWQQGNVFSCSVMHEALHNHYTQKSLSLSPGK |
| 221. | PM_10_CCxCD3- | bispecific | QVQLVESGGGLVKPGESLRLSCAASGFTFSDYYMYWVRQAPGKCLEW |
| | scFc_delGK | HLE | VAIISDHHHWTYYSDIIKGRFTISRDNAKNSLYLQMNSLKAEDTAVY |
| | | molecule | YCARGFPLLRHGAMDYWGQGTLVTVSSGGGGSGGGGSGGGGSDIQMT |
| | | | QSPSSLSASVGDRVTITCKASQNVDTNVAWYQQKPGQAPKSLIYSAS |
| | | | YRYSDVPSRFSGSASGTDFTLTISSVQSEDFATYYCQQYDSYPYTFG |
| | | | CGTKLEIKSGGGGSEVQLVESGGGLVQPGGSLKLSCAASGFTFNKYA |
| | | | MNWVRQAPGKGLEWVARIRSKYNNYATYYADSVKDRFTISRDDSKNT |
| | | | AYLQMNNLKTEDTAVYYCVRHGNFGNSYISYWAYWGQGTLVTVSSGG |
| | | | GGSGGGGSGGGGSQTVVTQEPSLTVSPGGTVTLTCGSSTGAVTSGNY |
| | | | PNWVQQKPGQAPRGLIGGTKFLAPGTPARFSGSLLGGKAALTLSGVQ |
| | | | PEDEAEYYCVLWYSNRWVFGGGTKLTVLGGGGDKTHTCPPCPAPELL |
| | | | GGPSVFLFPPKPKDTLMISRTPEVTCVVVDVSHEDPEVKFNWYVDGV |
| | | | EVHNAKTKPCEEQYGSTYRCVSVLTVLHQDWLNGKEYKCKVSNKALP |
| | | | APIEKTISKAKGQPREPQVYTLPPSREEMTKNQVSLTCLVKGFYPSD |
| | | | IAVEWESNGQPENNYKTTPPVLDSDGSFFLYSKLTVDKSRWQQGNVF |
| | | | SCSVMHEALHNHYTQKSLSLSPGGGGSGGGGSGGGGSGGGGSGGGGS |
| | | | GGGGSDKTHTCPPCPAPELLGGPSVFLFPPKPKDTLMISRTPEVTCV |
| | | | VVDVSHEDPEVKFNWYVDGVEVHNAKTKPCEEQYGSTYRCVSVLTVL |
| | | | HQDWLNGKEYKCKVSNKALPAPIEKTISKAKGQPREPQVYTLPPSRE |
| | | | EMTKNQVSLTCLVKGFYPSDIAVEWESNGQPENNYKTTPPVLDSDGS |
| | | | FFLYSKLTVDKSRWQQGNVFSCSVMHEALHNHYTQKSLSLSPGK |
| 222. | PM_11xCD3- | VH CDR1 | DYYMY |
| | ScFc | | |
| 223. | PM_11xCD3- | VH CDR2 | IISDGGYYTYYSDIIKG |
| | scFc | | |
| 224. | PM_11xCD3- | VH CDR3 | GFPLLRHGAMDY |
| | scFc | | |
| 225. | PM_11xCD3- | VL CDR1 | KASQNVDTNVA |
| | scFc | | |
| 226. | PM_11xCD3- | VL CDR2 | SASYRYS |
| | scFc | | |
| 227. | PM_11xCD3- | VL CDR3 | QQYDRQPLT |
| | scFc | | |
| 228. | PM_11xCD3- | VH | QVQLVESGGGLVKPGESLRLSCAASGFTFSDYYMYWVRQAPGKGLEW |
| | scFc | | VAIISDGGYYTYYSDIIKGRFTISRDNAKNSLYLQMNSLKAEDTAVY |
| | | | YCARGFPLLRHGAMDYWGQGTLVTVSS |
| 229. | PM_11xCD3- | VL | DIQMTQSPSSLSASVGDRVTITCKASQNVDTNVAWYQQKPGQAPKSL |
| | scFc | | IYSASYRYSDVPSRFSGSASGTDFTLTISSVQSEDFATYYCQQYDRQ |
| | | | PLTFGGGTKLEIK |
| 230. | PM_11xCD3- | scFv | QVQLVESGGGLVKPGESLRLSCAASGFTFSDYYMYWVRQAPGKGLEW |
| | scFc | | VAIISDGGYYTYYSDIIKGRFTISRDNAKNSLYLQMNSLKAEDTAVY |
| | | | YCARGFPLLRHGAMDYWGQGTLVTVSSGGGGSGGGGSGGGGSDIQMT |
| | | | QSPSSLSASVGDRVTITCKASQNVDTNVAWYQQKPGQAPKSLIYSAS |
| | | | YRYSDVPSRFSGSASGTDFTLTISSVQSEDFATYYCQQYDRQPLTFG |
| | | | GGTKLEIK |
| 231. | PM_11xCD3- | bispecific | QVQLVESGGGLVKPGESLRLSCAASGFTFSDYYMYWVRQAPGKGLEW |
| | scFc | molecule | VAIISDGGYYTYYSDIIKGRFTISRDNAKNSLYLQMNSLKAEDTAVY |
| | | | YCARGFPLLRHGAMDYWGQGTLVTVSSGGGGSGGGGSGGGGSDIQMT |
| | | | QSPSSLSASVGDRVTITCKASQNVDTNVAWYQQKPGQAPKSLIYSAS |
| | | | YRYSDVPSRFSGSASGTDFTLTISSVQSEDFATYYCQQYDRQPLTFG |
| | | | GGTKLEIKSGGGGSEVQLVESGGGLVQPGGSLKLSCAASGFTFNKYA |
| | | | MNWVRQAPGKGLEWVARIRSKYNNYATYYADSVKDRFTISRDDSKNT |
| | | | AYLQMNNLKTEDTAVYYCVRHGNFGNSYISYWAYWGQGTLVTVSSGG |
| | | | GGSGGGGSGGGGSQTVVTQEPSLTVSPGGTVTLTCGSSTGAVTSGNY |
| | | | PNWVQQKPGQAPRGLIGGTKFLAPGTPARFSGSLLGGKAALTLSGVQ |
| | | | PEDEAEYYCVLWYSNRWVFGGGTKLTVL |
| 232. | PM_11xCD3- | bispecific | QVQLVESGGGLVKPGESLRLSCAASGFTFSDYYMYWVRQAPGKGLEW |
| | scFc | HLE | VAIISDGGYYTYYSDIIKGRFTISRDNAKNSLYLQMNSLKAEDTAVY |
| | | molecule | YCARGFPLLRHGAMDYWGQGTLVTVSSGGGGSGGGGSGGGGSDIQMT |
| | | | QSPSSLSASVGDRVTITCKASQNVDTNVAWYQQKPGQAPKSLIYSAS |
| | | | YRYSDVPSRFSGSASGTDFTLTISSVQSEDFATYYCQQYDRQPLTFG |
| | | | GGTKLEIKSGGGGSEVQLVESGGGLVQPGGSLKLSCAASGFTFNKYA |
| | | | MNWVRQAPGKGLEWVARIRSKYNNYATYYADSVKDRFTISRDDSKNT |
| | | | AYLQMNNLKTEDTAVYYCVRHGNFGNSYISYWAYWGQGTLVTVSSGG |
| | | | GGSGGGGSGGGGSQTVVTQEPSLTVSPGGTVTLTCGSSTGAVTSGNY |
| | | | PNWVQQKPGQAPRGLIGGTKFLAPGTPARFSGSLLGGKAALTLSGVQ |
| | | | PEDEAEYYCVLWYSNRWVFGGGTKLTVLGGGGDKTHTCPPCPAPELL |
| | | | GGPSVFLFPPKPKDTLMISRTPEVTCVVVDVSHEDPEVKFNWYVDGV |
| | | | EVHNAKTKPCEEQYGSTYRCVSVLTVLHQDWLNGKEYKCKVSNKALP |
| | | | APIEKTISKAKGQPREPQVYTLPPSREEMTKNQVSLTCLVKGFYPSD |
| | | | IAVEWESNGQPENNYKTTPPVLDSDGSFFLYSKLTVDKSRWQQGNVF |
| | | | SCSVMHEALHNHYTQKSLSLSPGKGGGGSGGGGSGGGGSGGGGSGGG |
| | | | GSGGGGSDKTHTCPPCPAPELLGGPSVFLFPPKPKDTLMISRTPEVT |
| | | | CVVVDVSHEDPEVKFNWYVDGVEVHNAKTKPCEEQYGSTYRCVSVLT |
| | | | VLHQDWLNGKEYKCKVSNKALPAPIEKTISKAKGQPREPQVYTLPPS |
| | | | REEMTKNQVSLTCLVKGFYPSDIAVEWESNGQPENNYKTTPPVLDSD |
| | | | GSFFLYSKLTVDKSRWQQGNVFSCSVMHEALHNHYTQKSLSLSPGK |
| 233. | PM_11xCD3- | bispecific | QVQLVESGGGLVKPGESLRLSCAASGFTFSDYYMYWVRQAPGKGLEW |
| | scFc_delGK | HLE | VAIISDGGYYTYYSDIIKGRFTISRDNAKNSLYLQMNSLKAEDTAVY |
| | | molecule | YCARGFPLLRHGAMDYWGQGTLVTVSSGGGGSGGGGSGGGGSDIQMT |
| | | | QSPSSLSASVGDRVTITCKASQNVDTNVAWYQQKPGQAPKSLIYSAS |
| | | | YRYSDVPSRFSGSASGTDFTLTISSVQSEDFATYYCQQYDRQPLTFG |
| | | | GGTKLEIKSGGGGSEVQLVESGGGLVQPGGSLKLSCAASGFTFNKYA |
| | | | MNWVRQAPGKGLEWVARIRSKYNNYATYYADSVKDRFTISRDDSKNT |
| | | | AYLQMNNLKTEDTAVYYCVRHGNFGNSYISYWAYWGQGTLVTVSSGG |
| | | | GGSGGGGSGGGGSQTVVTQEPSLTVSPGGTVTLTCGSSTGAVTSGNY |
| | | | PNWVQQKPGQAPRGLIGGTKFLAPGTPARFSGSLLGGKAALTLSGVQ |
| | | | PEDEAEYYCVLWYSNRWVFGGGTKLTVLGGGGDKTHTCPPCPAPELL |
| | | | GGPSVFLFPPKPKDTLMISRTPEVTCVVVDVSHEDPEVKFNWYVDGV |
| | | | EVHNAKTKPCEEQYGSTYRCVSVLTVLHQDWLNGKEYKCKVSNKALP |
| | | | APIEKTISKAKGQPREPQVYTLPPSREEMTKNQVSLTCLVKGFYPSD |
| | | | IAVEWESNGQPENNYKTTPPVLDSDGSFFLYSKLTVDKSRWQQGNVF |
| | | | SCSVMHEALHNHYTQKSLSLSPGGGGSGGGGSGGGGSGGGGSGGGGS |
| | | | GGGGSDKTHTCPPCPAPELLGGPSVFLFPPKPKDTLMISRTPEVTCV |
| | | | VVDVSHEDPEVKFNWYVDGVEVHNAKTKPCEEQYGSTYRCVSVLTVL |
| | | | HQDWLNGKEYKCKVSNKALPAPIEKTISKAKGQPREPQVYTLPPSRE |
| | | | EMTKNQVSLTCLVKGFYPSDIAVEWESNGQPENNYKTTPPVLDSDGS |
| | | | FFLYSKLTVDKSRWQQGNVFSCSVMHEALHNHYTQKSLSLSPGK |
| 234. | PM_11_CCxCD3- | VH | QVQLVESGGGLVKPGESLRLSCAASGFTFSDYYMYWVRQAPGKCLEW |
| | scFc | | VAIISDGGYYTYYSDIIKGRFTISRDNAKNSLYLQMNSLKAEDTAVY |
| | | | YCARGFPLLRHGAMDYWGQGTLVTVSS |
| 235. | PM_11_CCxCD3- | VL | DIQMTQSPSSLSASVGDRVTITCKASQNVDTNVAWYQQKPGQAPKSL |
| | scFc | | IYSASYRYSDVPSRFSGSASGTDFTLTISSVQSEDFATYYCQQYDRQ |
| | | | PLTFGCGTKLEIK |
| 236. | PM_11_CCxCD3- | scFv | QVQLVESGGGLVKPGESLRLSCAASGFTFSDYYMYWVRQAPGKCLEW |
| | scFc | | VAIISDGGYYTYYSDIIKGRFTISRDNAKNSLYLQMNSLKAEDTAVY |
| | | | YCARGFPLLRHGAMDYWGQGTLVTVSSGGGGSGGGGSGGGGSDIQMT |
| | | | QSPSSLSASVGDRVTITCKASQNVDTNVAWYQQKPGQAPKSLIYSAS |
| | | | YRYSDVPSRFSGSASGTDFTLTISSVQSEDFATYYCQQYDRQPLTFG |
| | | | CGTKLEIK |
| 237. | PM_11_CCxCD3- | bispecific | QVQLVESGGGLVKPGESLRLSCAASGFTFSDYYMYWVRQAPGKCLEW |
| | scFc | molecule | VAIISDGGYYTYYSDIIKGRFTISRDNAKNSLYLQMNSLKAEDTAVY |
| | | | YCARGFPLLRHGAMDYWGQGTLVTVSSGGGGSGGGGSGGGGSDIQMT |
| | | | QSPSSLSASVGDRVTITCKASQNVDTNVAWYQQKPGQAPKSLIYSAS |
| | | | YRYSDVPSRFSGSASGTDFTLTISSVQSEDFATYYCQQYDRQPLTFG |
| | | | CGTKLEIKSGGGGSEVQLVESGGGLVQPGGSLKLSCAASGFTFNKYA |
| | | | MNWVRQAPGKGLEWVARIRSKYNNYATYYADSVKDRFTISRDDSKNT |
| | | | AYLQMNNLKTEDTAVYYCVRHGNFGNSYISYWAYWGQGTLVTVSSGG |
| | | | GGSGGGGSGGGGSQTVVTQEPSLTVSPGGTVTLTCGSSTGAVTSGNY |
| | | | PNWVQQKPGQAPRGLIGGTKFLAPGTPARFSGSLLGGKAALTLSGVQ |
| | | | PEDEAEYYCVLWYSNRWVFGGGTKLTVL |
| 238. | PM_11_CCxCD3- | bispecific | QVQLVESGGGLVKPGESLRLSCAASGFTFSDYYMYWVRQAPGKCLEW |
| | scFc | HLE | VAIISDGGYYTYYSDIIKGRFTISRDNAKNSLYLQMNSLKAEDTAVY |
| | | molecule | YCARGFPLLRHGAMDYWGQGTLVTVSSGGGGSGGGGSGGGGSDIQMT |
| | | | QSPSSLSASVGDRVTITCKASQNVDTNVAWYQQKPGQAPKSLIYSAS |
| | | | YRYSDVPSRFSGSASGTDFTLTISSVQSEDFATYYCQQYDRQPLTFG |
| | | | CGTKLEIKSGGGGSEVQLVESGGGLVQPGGSLKLSCAASGFTFNKYA |
| | | | MNWVRQAPGKGLEWVARIRSKYNNYATYYADSVKDRFTISRDDSKNT |
| | | | AYLQMNNLKTEDTAVYYCVRHGNFGNSYISYWAYWGQGTLVTVSSGG |
| | | | GGSGGGGSGGGGSQTVVTQEPSLTVSPGGTVTLTCGSSTGAVTSGNY |
| | | | PNWVQQKPGQAPRGLIGGTKFLAPGTPARFSGSLLGGKAALTLSGVQ |
| | | | PEDEAEYYCVLWYSNRWVFGGGTKLTVLGGGGDKTHTCPPCPAPELL |
| | | | GGPSVFLFPPKPKDTLMISRTPEVTCVVVDVSHEDPEVKFNWYVDGV |
| | | | EVHNAKTKPCEEQYGSTYRCVSVLTVLHQDWLNGKEYKCKVSNKALP |
| | | | APIEKTISKAKGQPREPQVYTLPPSREEMTKNQVSLTCLVKGFYPSD |
| | | | IAVEWESNGQPENNYKTTPPVLDSDGSFFLYSKLTVDKSRWQQGNVF |
| | | | SCSVMHEALHNHYTQKSLSLSPGKGGGGSGGGGSGGGGSGGGGSGGG |
| | | | GSGGGGSDKTHTCPPCPAPELLGGPSVFLFPPKPKDTLMISRTPEVT |
| | | | CVVVDVSHEDPEVKFNWYVDGVEVHNAKTKPCEEQYGSTYRCVSVLT |
| | | | VLHQDWLNGKEYKCKVSNKALPAPIEKTISKAKGQPREPQVYTLPPS |
| | | | REEMTKNQVSLTCLVKGFYPSDIAVEWESNGQPENNYKTTPPVLDSD |
| | | | GSFFLYSKLTVDKSRWQQGNVFSCSVMHEALHNHYTQKSLSLSPGK |
| 239. | PM_11_CCxCD3- | bispecific | QVQLVESGGGLVKPGESLRLSCAASGFTFSDYYMYWVRQAPGKCLEW |
| | scFc_delGK | HLE | VAIISDGGYYTYYSDIIKGRFTISRDNAKNSLYLQMNSLKAEDTAVY |
| | | molecule | YCARGFPLLRHGAMDYWGQGTLVTVSSGGGGSGGGGSGGGGSDIQMT |
| | | | QSPSSLSASVGDRVTITCKASQNVDTNVAWYQQKPGQAPKSLIYSAS |
| | | | YRYSDVPSRFSGSASGTDFTLTISSVQSEDFATYYCQQYDRQPLTFG |
| | | | CGTKLEIKSGGGGSEVQLVESGGGLVQPGGSLKLSCAASGFTFNKYA |
| | | | MNWVRQAPGKGLEWVARIRSKYNNYATYYADSVKDRFTISRDDSKNT |
| | | | AYLQMNNLKTEDTAVYYCVRHGNFGNSYISYWAYWGQGTLVTVSSGG |
| | | | GGSGGGGSGGGGSQTVVTQEPSLTVSPGGTVTLTCGSSTGAVTSGNY |
| | | | PNWVQQKPGQAPRGLIGGTKFLAPGTPARFSGSLLGGKAALTLSGVQ |
| | | | PEDEAEYYCVLWYSNRWVFGGGTKLTVLGGGGDKTHTCPPCPAPELL |
| | | | GGPSVFLFPPKPKDTLMISRTPEVTCVVVDVSHEDPEVKFNWYVDGV |
| | | | EVHNAKTKPCEEQYGSTYRCVSVLTVLHQDWLNGKEYKCKVSNKALP |
| | | | APIEKTISKAKGQPREPQVYTLPPSREEMTKNQVSLTCLVKGFYPSD |
| | | | IAVEWESNGQPENNYKTTPPVLDSDGSFFLYSKLTVDKSRWQQGNVF |
| | | | SCSVMHEALHNHYTQKSLSLSPGGGGSGGGGSGGGGSGGGGSGGGGS |
| | | | GGGGSDKTHTCPPCPAPELLGGPSVFLFPPKPKDTLMISRTPEVTCV |
| | | | VVDVSHEDPEVKFNWYVDGVEVHNAKTKPCEEQYGSTYRCVSVLTVL |
| | | | HQDWLNGKEYKCKVSNKALPAPIEKTISKAKGQPREPQVYTLPPSRE |
| | | | EMTKNQVSLTCLVKGFYPSDIAVEWESNGQPENNYKTTPPVLDSDGS |
| | | | FFLYSKLTVDKSRWQQGNVFSCSVMHEALHNHYTQKSLSLSPGK |
| 240. | PM_12xCD3- | VH CDR1 | DYYMN |
| | scFc | | |
| 241. | PM_12xCD3- | VH CDR2 | IISDGGYYTYYSDIIKG |
| | scFc | | |
| 242. | PM_12xCD3- | VH CDR3 | GFPLLRHGAMDY |
| | scFc | | |
| 243. | PM_12xCD3- | VL CDR1 | KASQNVDTNVA |
| | scFc | | |
| 244. | PM_12xCD3- | VL CDR2 | SASYRYS |
| | scFc | | |
| 245. | PM_12xCD3- | VL CDR3 | QQYDLLLLT |
| | scFc | | |
| 246. | PM_12xCD3- | VH | QVQLVESGGGLVKPGESLRLSCAASGFTFSDYYMNWVRQAPGKGLEW |
| | scFc | | VAIISDGGYYTYYSDIIKGRFTISRDNAKNSLYLQMNSLKAEDTAVY |
| | | | YCARGFPLLRHGAMDYWGQGTLVTVSS |
| 247. | PM_12xCD3- | VL | DIQMTQSPSSLSASVGDRVTITCKASQNVDTNVAWYQQKPGQAPKSL |
| | scFc | | IYSASYRYSDVPSRFSGSASGTDFTLTISSLQSEDFATYYCQQYDLL |
| | | | LLTFGGGTKLEIK |
| 248. | PM_12xCD3- | scFv | QVQLVESGGGLVKPGESLRLSCAASGFTFSDYYMNWVRQAPGKGLEW |
| | scFc | | VAIISDGGYYTYYSDIIKGRFTISRDNAKNSLYLQMNSLKAEDTAVY |
| | | | YCARGFPLLRHGAMDYWGQGTLVTVSSGGGGSGGGGSGGGGSDIQMT |
| | | | QSPSSLSASVGDRVTITCKASQNVDTNVAWYQQKPGQAPKSLIYSAS |
| | | | YRYSDVPSRFSGSASGTDFTLTISSLQSEDFATYYCQQYDLLLLTFG |
| | | | GGTKLEIK |
| 249. | PM_12xCD3- | bispecific | QVQLVESGGGLVKPGESLRLSCAASGFTFSDYYMNWVRQAPGKGLEW |
| | scFc | molecule | VAIISDGGYYTYYSDIIKGRFTISRDNAKNSLYLQMNSLKAEDTAVY |
| | | | YCARGFPLLRHGAMDYWGQGTLVTVSSGGGGSGGGGSGGGGSDIQMT |
| | | | QSPSSLSASVGDRVTITCKASQNVDTNVAWYQQKPGQAPKSLIYSAS |
| | | | YRYSDVPSRFSGSASGTDFTLTISSLQSEDFATYYCQQYDLLLLTFG |
| | | | GGTKLEIKSGGGGSEVQLVESGGGLVQPGGSLKLSCAASGFTFNKYA |
| | | | MNWVRQAPGKGLEWVARIRSKYNNYATYYADSVKDRFTISRDDSKNT |
| | | | AYLQMNNLKTEDTAVYYCVRHGNFGNSYISYWAYWGQGTLVTVSSGG |
| | | | GGSGGGGSGGGGSQTVVTQEPSLTVSPGGTVTLTCGSSTGAVTSGNY |
| | | | PNWVQQKPGQAPRGLIGGTKFLAPGTPARFSGSLLGGKAALTLSGVQ |
| | | | PEDEAEYYCVLWYSNRWVFGGGTKLTVL |
| 250. | PM_12xCD3- | bispecific | QVQLVESGGGLVKPGESLRLSCAASGFTFSDYYMNWVRQAPGKGLEW |
| | scFc | HLE | VAIISDGGYYTYYSDIIKGRFTISRDNAKNSLYLQMNSLKAEDTAVY |
| | | molecule | YCARGFPLLRHGAMDYWGQGTLVTVSSGGGGSGGGGSGGGGSDIQMT |
| | | | QSPSSLSASVGDRVTITCKASQNVDTNVAWYQQKPGQAPKSLIYSAS |
| | | | YRYSDVPSRFSGSASGTDFTLTISSLQSEDFATYYCQQYDLLLLTFG |
| | | | GGTKLEIKSGGGGSEVQLVESGGGLVQPGGSLKLSCAASGFTFNKYA |
| | | | MNWVRQAPGKGLEWVARIRSKYNNYATYYADSVKDRFTISRDDSKNT |
| | | | AYLQMNNLKTEDTAVYYCVRHGNFGNSYISYWAYWGQGTLVTVSSGG |
| | | | GGSGGGGSGGGGSQTVVTQEPSLTVSPGGTVTLTCGSSTGAVTSGNY |
| | | | PNWVQQKPGQAPRGLIGGTKFLAPGTPARFSGSLLGGKAALTLSGVQ |
| | | | PEDEAEYYCVLWYSNRWVFGGGTKLTVLGGGGDKTHTCPPCPAPELL |
| | | | GGPSVFLFPPKPKDTLMISRTPEVTCVVVDVSHEDPEVKFNWYVDGV |
| | | | EVHNAKTKPCEEQYGSTYRCVSVLTVLHQDWLNGKEYKCKVSNKALP |
| | | | APIEKTISKAKGQPREPQVYTLPPSREEMTKNQVSLTCLVKGFYPSD |
| | | | IAVEWESNGQPENNYKTTPPVLDSDGSFFLYSKLTVDKSRWQQGNVF |
| | | | SCSVMHEALHNHYTQKSLSLSPGKGGGGSGGGGSGGGGSGGGGSGGG |
| | | | GSGGGGSDKTHTCPPCPAPELLGGPSVFLFPPKPKDTLMISRTPEVT |
| | | | CVVVDVSHEDPEVKFNWYVDGVEVHNAKTKPCEEQYGSTYRCVSVLT |
| | | | VLHQDWLNGKEYKCKVSNKALPAPIEKTISKAKGQPREPQVYTLPPS |
| | | | REEMTKNQVSLTCLVKGFYPSDIAVEWESNGQPENNYKTTPPVLDSD |
| | | | GSFFLYSKLTVDKSRWQQGNVFSCSVMHEALHNHYTQKSLSLSPGK |
| 251. | PM_12xCD3- | bispecific | QVQLVESGGGLVKPGESLRLSCAASGFTFSDYYMNWVRQAPGKGLEW |
| | scFc_delGK | HLE | VAIISDGGYYTYYSDIIKGRFTISRDNAKNSLYLQMNSLKAEDTAVY |
| | | molecule | YCARGFPLLRHGAMDYWGQGTLVTVSSGGGGSGGGGSGGGGSDIQMT |
| | | | QSPSSLSASVGDRVTITCKASQNVDTNVAWYQQKPGQAPKSLIYSAS |
| | | | YRYSDVPSRFSGSASGTDFTLTISSLQSEDFATYYCQQYDLLLLTFG |
| | | | GGTKLEIKSGGGGSEVQLVESGGGLVQPGGSLKLSCAASGFTFNKYA |
| | | | MNWVRQAPGKGLEWVARIRSKYNNYATYYADSVKDRFTISRDDSKNT |
| | | | AYLQMNNLKTEDTAVYYCVRHGNFGNSYISYWAYWGQGTLVTVSSGG |
| | | | GGSGGGGSGGGGSQTVVTQEPSLTVSPGGTVTLTCGSSTGAVTSGNY |
| | | | PNWVQQKPGQAPRGLIGGTKFLAPGTPARFSGSLLGGKAALTLSGVQ |
| | | | PEDEAEYYCVLWYSNRWVFGGGTKLTVLGGGGDKTHTCPPCPAPELL |
| | | | GGPSVFLFPPKPKDTLMISRTPEVTCVVVDVSHEDPEVKFNWYVDGV |
| | | | EVHNAKTKPCEEQYGSTYRCVSVLTVLHQDWLNGKEYKCKVSNKALP |
| | | | APIEKTISKAKGQPREPQVYTLPPSREEMTKNQVSLTCLVKGFYPSD |
| | | | IAVEWESNGQPENNYKTTPPVLDSDGSFFLYSKLTVDKSRWQQGNVF |
| | | | SCSVMHEALHNHYTQKSLSLSPGGGGSGGGGSGGGGSGGGGSGGGGS |
| | | | GGGGSDKTHTCPPCPAPELLGGPSVFLFPPKPKDTLMISRTPEVTCV |
| | | | VVDVSHEDPEVKFNWYVDGVEVHNAKTKPCEEQYGSTYRCVSVLTVL |
| | | | HQDWLNGKEYKCKVSNKALPAPIEKTISKAKGQPREPQVYTLPPSRE |
| | | | EMTKNQVSLTCLVKGFYPSDIAVEWESNGQPENNYKTTPPVLDSDGS |
| | | | FFLYSKLTVDKSRWQQGNVFSCSVMHEALHNHYTQKSLSLSPGK |
| 252. | PM_12_CCxCD3- | VH | QVQLVESGGGLVKPGESLRLSCAASGFTFSDYYMNWVRQAPGKCLEW |
| | scFc | | VAIISDGGYYTYYSDIIKGRFTISRDNAKNSLYLQMNSLKAEDTAVY |
| | | | YCARGFPLLRHGAMDYWGQGTLVTVSS |
| 253. | PM_12_CCxCD3- | VL | DIQMTQSPSSLSASVGDRVTITCKASQNVDTNVAWYQQKPGQAPKSL |
| | scFc | | IYSASYRYSDVPSRFSGSASGTDFTLTISSLQSEDFATYYCQQYDLL |
| | | | LLTFGCGTKLEIK |
| 254. | PM_12_CCxCD3- | scFv | QVQLVESGGGLVKPGESLRLSCAASGFTFSDYYMNWVRQAPGKCLEW |
| | scFc | | VAIISDGGYYTYYSDIIKGRFTISRDNAKNSLYLQMNSLKAEDTAVY |
| | | | YCARGFPLLRHGAMDYWGQGTLVTVSSGGGGSGGGGSGGGGSDIQMT |
| | | | QSPSSLSASVGDRVTITCKASQNVDTNVAWYQQKPGQAPKSLIYSAS |
| | | | YRYSDVPSRFSGSASGTDFTLTISSLQSEDFATYYCQQYDLLLLTFG |
| | | | CGTKLEIK |
| 255. | PM_12_CCxCD3- | bispecific | QVQLVESGGGLVKPGESLRLSCAASGFTFSDYYMNWVRQAPGKCLEW |
| | scFc | molecule | VAIISDGGYYTYYSDIIKGRFTISRDNAKNSLYLQMNSLKAEDTAVY |
| | | | YCARGFPLLRHGAMDYWGQGTLVTVSSGGGGSGGGGSGGGGSDIQMT |
| | | | QSPSSLSASVGDRVTITCKASQNVDTNVAWYQQKPGQAPKSLIYSAS |
| | | | YRYSDVPSRFSGSASGTDFTLTISSLQSEDFATYYCQQYDLLLLTFG |
| | | | CGTKLEIKSGGGGSEVQLVESGGGLVQPGGSLKLSCAASGFTFNKYA |
| | | | MNWVRQAPGKGLEWVARIRSKYNNYATYYADSVKDRFTISRDDSKNT |
| | | | AYLQMNNLKTEDTAVYYCVRHGNFGNSYISYWAYWGQGTLVTVSSGG |
| | | | GGSGGGGSGGGGSQTVVTQEPSLTVSPGGTVTLTCGSSTGAVTSGNY |
| | | | PNWVQQKPGQAPRGLIGGTKFLAPGTPARFSGSLLGGKAALTLSGVQ |
| | | | PEDEAEYYCVLWYSNRWVFGGGTKLTVL |
| 256. | PM_12_CCxCD3- | bispecific | QVQLVESGGGLVKPGESLRLSCAASGFTFSDYYMNWVRQAPGKCLEW |
| | scFc | HLE | VAIISDGGYYTYYSDIIKGRFTISRDNAKNSLYLQMNSLKAEDTAVY |
| | | molecule | YCARGFPLLRHGAMDYWGQGTLVTVSSGGGGSGGGGSGGGGSDIQMT |
| | | | QSPSSLSASVGDRVTITCKASQNVDTNVAWYQQKPGQAPKSLIYSAS |
| | | | YRYSDVPSRFSGSASGTDFTLTISSLQSEDFATYYCQQYDLLLLTFG |
| | | | CGTKLEIKSGGGGSEVQLVESGGGLVQPGGSLKLSCAASGFTFNKYA |
| | | | MNWVRQAPGKGLEWVARIRSKYNNYATYYADSVKDRFTISRDDSKNT |
| | | | AYLQMNNLKTEDTAVYYCVRHGNFGNSYISYWAYWGQGTLVTVSSGG |
| | | | GGSGGGGSGGGGSQTVVTQEPSLTVSPGGTVTLTCGSSTGAVTSGNY |
| | | | PNWVQQKPGQAPRGLIGGTKFLAPGTPARFSGSLLGGKAALTLSGVQ |
| | | | PEDEAEYYCVLWYSNRWVFGGGTKLTVLGGGGDKTHTCPPCPAPELL |
| | | | GGPSVFLFPPKPKDTLMISRTPEVTCVVVDVSHEDPEVKFNWYVDGV |
| | | | EVHNAKTKPCEEQYGSTYRCVSVLTVLHQDWLNGKEYKCKVSNKALP |
| | | | APIEKTISKAKGQPREPQVYTLPPSREEMTKNQVSLTCLVKGFYPSD |
| | | | IAVEWESNGQPENNYKTTPPVLDSDGSFFLYSKLTVDKSRWQQGNVF |
| | | | SCSVMHEALHNHYTQKSLSLSPGKGGGGSGGGGSGGGGSGGGGSGGG |
| | | | GSGGGGSDKTHTCPPCPAPELLGGPSVFLFPPKPKDTLMISRTPEVT |
| | | | CVVVDVSHEDPEVKFNWYVDGVEVHNAKTKPCEEQYGSTYRCVSVLT |
| | | | VLHQDWLNGKEYKCKVSNKALPAPIEKTISKAKGQPREPQVYTLPPS |
| | | | REEMTKNQVSLTCLVKGFYPSDIAVEWESNGQPENNYKTTPPVLDSD |
| | | | GSFFLYSKLTVDKSRWQQGNVFSCSVMHEALHNHYTQKSLSLSPGK |
| 257. | PM_12_CCxCD3- | bispecific | QVQLVESGGGLVKPGESLRLSCAASGFTFSDYYMNWVRQAPGKCLEW |
| | scFc_delGK | HLE | VAIISDGGYYTYYSDIIKGRFTISRDNAKNSLYLQMNSLKAEDTAVY |
| | | molecule | YCARGFPLLRHGAMDYWGQGTLVTVSSGGGGSGGGGSGGGGSDIQMT |
| | | | QSPSSLSASVGDRVTITCKASQNVDTNVAWYQQKPGQAPKSLIYSAS |
| | | | YRYSDVPSRFSGSASGTDFTLTISSLQSEDFATYYCQQYDLLLLTFG |
| | | | CGTKLEIKSGGGGSEVQLVESGGGLVQPGGSLKLSCAASGFTFNKYA |
| | | | MNWVRQAPGKGLEWVARIRSKYNNYATYYADSVKDRFTISRDDSKNT |
| | | | AYLQMNNLKTEDTAVYYCVRHGNFGNSYISYWAYWGQGTLVTVSSGG |
| | | | GGSGGGGSGGGGSQTVVTQEPSLTVSPGGTVTLTCGSSTGAVTSGNY |
| | | | PNWVQQKPGQAPRGLIGGTKFLAPGTPARFSGSLLGGKAALTLSGVQ |
| | | | PEDEAEYYCVLWYSNRWVFGGGTKLTVLGGGGDKTHTCPPCPAPELL |
| | | | GGPSVFLFPPKPKDTLMISRTPEVTCVVVDVSHEDPEVKFNWYVDGV |
| | | | EVHNAKTKPCEEQYGSTYRCVSVLTVLHQDWLNGKEYKCKVSNKALP |
| | | | APIEKTISKAKGQPREPQVYTLPPSREEMTKNQVSLTCLVKGFYPSD |
| | | | IAVEWESNGQPENNYKTTPPVLDSDGSFFLYSKLTVDKSRWQQGNVF |
| | | | SCSVMHEALHNHYTQKSLSLSPGGGGSGGGGSGGGGSGGGGSGGGGS |
| | | | GGGGSDKTHTCPPCPAPELLGGPSVFLFPPKPKDTLMISRTPEVTCV |
| | | | VVDVSHEDPEVKFNWYVDGVEVHNAKTKPCEEQYGSTYRCVSVLTVL |
| | | | HQDWLNGKEYKCKVSNKALPAPIEKTISKAKGQPREPQVYTLPPSRE |
| | | | EMTKNQVSLTCLVKGFYPSDIAVEWESNGQPENNYKTTPPVLDSDGS |
| | | | FFLYSKLTVDKSRWQQGNVFSCSVMHEALHNHYTQKSLSLSPGK |
| 258. | PM_13xCD3- | VH CDR1 | DYYMY |
| | scFc | | |
| 259. | PM_13xCD3- | VH CDR2 | IISDSTLHTYYSDIIKG |
| | scFc | | |
| 260. | PM_13xCD3- | VH CDR3 | GFPLLRHGAMDY |
| | scFc | | |
| 261. | PM_13xCD3- | VL CDR1 | KASQNVDTNVA |
| | scFc | | |
| 262. | PM_13xCD3- | VL CDR2 | SASYRYS |
| | scFc | | |
| 263. | PM_13xCD3- | VL CDR3 | QQYDSYPYT |
| | scFc | | |
| 264. | PM_13xCD3- | VH | QVQLVESGGGLVKPGESLRLSCAASGFTFSDYYMYWVRQAPGKGLEW |
| | scFc | | VAIISDSTLHTYYSDIIKGRFTISRDNAKNSLYLQMNSLKAEDTAVY |
| | | | YCARGFPLLRHGAMDYWGQGTLVTVSS |
| 265. | PM_13xCD3- | VL | DIQMTQSPSSLSASVGDRVTITCKASQNVDTNVAWYQQKPGQAPKSL |
| | scFc | | IYSASYRYSDVPSRFSGSASGTDFTLTISSVQSEDFATYYCQQYDSY |
| | | | PYTFGGGTKLEIK |
| 266. | PM_13xCD3- | scFv | QVQLVESGGGLVKPGESLRLSCAASGFTFSDYYMYWVRQAPGKGLEW |
| | scFc | | VAIISDSTLHTYYSDIIKGRFTISRDNAKNSLYLQMNSLKAEDTAVY |
| | | | YCARGFPLLRHGAMDYWGQGTLVTVSSGGGGSGGGGSGGGGSDIQMT |
| | | | QSPSSLSASVGDRVTITCKASQNVDTNVAWYQQKPGQAPKSLIYSAS |
| | | | YRYSDVPSRFSGSASGTDFTLTISSVQSEDFATYYCQQYDSYPYTFG |
| | | | GGTKLEIK |
| 267. | PM_13xCD3- | bispecific | QVQLVESGGGLVKPGESLRLSCAASGFTFSDYYMYWVRQAPGKGLEW |
| | scFc | molecule | VAIISDSTLHTYYSDIIKGRFTISRDNAKNSLYLQMNSLKAEDTAVY |
| | | | YCARGFPLLRHGAMDYWGQGTLVTVSSGGGGSGGGGSGGGGSDIQMT |
| | | | QSPSSLSASVGDRVTITCKASQNVDTNVAWYQQKPGQAPKSLIYSAS |
| | | | YRYSDVPSRFSGSASGTDFTLTISSVQSEDFATYYCQQYDSYPYTFG |
| | | | GGTKLEIKSGGGGSEVQLVESGGGLVQPGGSLKLSCAASGFTFNKYA |
| | | | MNWVRQAPGKGLEWVARIRSKYNNYATYYADSVKDRFTISRDDSKNT |
| | | | AYLQMNNLKTEDTAVYYCVRHGNFGNSYISYWAYWGQGTLVTVSSGG |
| | | | GGSGGGGSGGGGSQTVVTQEPSLTVSPGGTVTLTCGSSTGAVTSGNY |
| | | | PNWVQQKPGQAPRGLIGGTKFLAPGTPARFSGSLLGGKAALTLSGVQ |
| | | | PEDEAEYYCVLWYSNRWVFGGGTKLTVL |
| 268. | PM_13xCD3- | bispecific | QVQLVESGGGLVKPGESLRLSCAASGFTFSDYYMYWVRQAPGKGLEW |
| | scFc | HLE | VAIISDSTLHTYYSDIIKGRFTISRDNAKNSLYLQMNSLKAEDTAVY |
| | | molecule | YCARGFPLLRHGAMDYWGQGTLVTVSSGGGGSGGGGSGGGGSDIQMT |
| | | | QSPSSLSASVGDRVTITCKASQNVDTNVAWYQQKPGQAPKSLIYSAS |
| | | | YRYSDVPSRFSGSASGTDFTLTISSVQSEDFATYYCQQYDSYPYTFG |
| | | | GGTKLEIKSGGGGSEVQLVESGGGLVQPGGSLKLSCAASGFTFNKYA |
| | | | MNWVRQAPGKGLEWVARIRSKYNNYATYYADSVKDRFTISRDDSKNT |
| | | | AYLQMNNLKTEDTAVYYCVRHGNFGNSYISYWAYWGQGTLVTVSSGG |
| | | | GGSGGGGSGGGGSQTVVTQEPSLTVSPGGTVTLTCGSSTGAVTSGNY |
| | | | PNWVQQKPGQAPRGLIGGTKFLAPGTPARFSGSLLGGKAALTLSGVQ |
| | | | PEDEAEYYCVLWYSNRWVFGGGTKLTVLGGGGDKTHTCPPCPAPELL |
| | | | GGPSVFLFPPKPKDTLMISRTPEVTCVVVDVSHEDPEVKFNWYVDGV |
| | | | EVHNAKTKPCEEQYGSTYRCVSVLTVLHQDWLNGKEYKCKVSNKALP |
| | | | APIEKTISKAKGQPREPQVYTLPPSREEMTKNQVSLTCLVKGFYPSD |
| | | | IAVEWESNGQPENNYKTTPPVLDSDGSFFLYSKLTVDKSRWQQGNVF |
| | | | SCSVMHEALHNHYTQKSLSLSPGKGGGGSGGGGSGGGGSGGGGSGGG |
| | | | GSGGGGSDKTHTCPPCPAPELLGGPSVFLFPPKPKDTLMISRTPEVT |
| | | | CVVVDVSHEDPEVKFNWYVDGVEVHNAKTKPCEEQYGSTYRCVSVLT |
| | | | VLHQDWLNGKEYKCKVSNKALPAPIEKTISKAKGQPREPQVYTLPPS |
| | | | REEMTKNQVSLTCLVKGFYPSDIAVEWESNGQPENNYKTTPPVLDSD |
| | | | GSFFLYSKLTVDKSRWQQGNVFSCSVMHEALHNHYTQKSLSLSPGK |
| 269. | PM_13xCD3- | bispecific | QVQLVESGGGLVKPGESLRLSCAASGFTFSDYYMYWVRQAPGKGLEW |
| | scFc_delGK | HLE | VAIISDSTLHTYYSDIIKGRFTISRDNAKNSLYLQMNSLKAEDTAVY |
| | | molecule | YCARGFPLLRHGAMDYWGQGTLVTVSSGGGGSGGGGSGGGGSDIQMT |
| | | | QSPSSLSASVGDRVTITCKASQNVDTNVAWYQQKPGQAPKSLIYSAS |
| | | | YRYSDVPSRFSGSASGTDFTLTISSVQSEDFATYYCQQYDSYPYTFG |
| | | | GGTKLEIKSGGGGSEVQLVESGGGLVQPGGSLKLSCAASGFTFNKYA |
| | | | MNWVRQAPGKGLEWVARIRSKYNNYATYYADSVKDRFTISRDDSKNT |
| | | | AYLQMNNLKTEDTAVYYCVRHGNFGNSYISYWAYWGQGTLVTVSSGG |
| | | | GGSGGGGSGGGGSQTVVTQEPSLTVSPGGTVTLTCGSSTGAVTSGNY |
| | | | PNWVQQKPGQAPRGLIGGTKFLAPGTPARFSGSLLGGKAALTLSGVQ |
| | | | PEDEAEYYCVLWYSNRWVFGGGTKLTVLGGGGDKTHTCPPCPAPELL |
| | | | GGPSVFLFPPKPKDTLMISRTPEVTCVVVDVSHEDPEVKFNWYVDGV |
| | | | EVHNAKTKPCEEQYGSTYRCVSVLTVLHQDWLNGKEYKCKVSNKALP |
| | | | APIEKTISKAKGQPREPQVYTLPPSREEMTKNQVSLTCLVKGFYPSD |
| | | | IAVEWESNGQPENNYKTTPPVLDSDGSFFLYSKLTVDKSRWQQGNVF |
| | | | SCSVMHEALHNHYTQKSLSLSPGGGGSGGGGSGGGGSGGGGSGGGGS |
| | | | GGGGSDKTHTCPPCPAPELLGGPSVFLFPPKPKDTLMISRTPEVTCV |
| | | | VVDVSHEDPEVKFNWYVDGVEVHNAKTKPCEEQYGSTYRCVSVLTVL |
| | | | HQDWLNGKEYKCKVSNKALPAPIEKTISKAKGQPREPQVYTLPPSRE |
| | | | EMTKNQVSLTCLVKGFYPSDIAVEWESNGQPENNYKTTPPVLDSDGS |
| | | | FFLYSKLTVDKSRWQQGNVFSCSVMHEALHNHYTQKSLSLSPGK |
| 270. | PM_13_CCxCD3- | VH | QVQLVESGGGLVKPGESLRLSCAASGFTFSDYYMYWVRQAPGKCLEW |
| | scFc | | VAIISDSTLHTYYSDIIKGRFTISRDNAKNSLYLQMNSLKAEDTAVY |
| | | | YCARGFPLLRHGAMDYWGQGTLVTVSS |
| 271. | PM_13_CCxCD3- | VL | DIQMTQSPSSLSASVGDRVTITCKASQNVDTNVAWYQQKPGQAPKSL |
| | scFc | | IYSASYRYSDVPSRFSGSASGTDFTLTISSVQSEDFATYYCQQYDSY |
| | | | PYTFGCGTKLEIK |
| 272. | PM_13_CCxCD3- | scFv | QVQLVESGGGLVKPGESLRLSCAASGFTFSDYYMYWVRQAPGKCLEW |
| | scFc | | VAIISDSTLHTYYSDIIKGRFTISRDNAKNSLYLQMNSLKAEDTAVY |
| | | | YCARGFPLLRHGAMDYWGQGTLVTVSSGGGGSGGGGSGGGGSDIQMT |
| | | | QSPSSLSASVGDRVTITCKASQNVDTNVAWYQQKPGQAPKSLIYSAS |
| | | | YRYSDVPSRFSGSASGTDFTLTISSVQSEDFATYYCQQYDSYPYTFG |
| | | | CGTKLEIK |
| 273. | PM_13_CCxCD3- | bispecific | QVQLVESGGGLVKPGESLRLSCAASSDYYMYWVRQAPGFTFGKCLEW |
| | scFc | molecule | VAIISDSTLHTYYSDIIKGRFTISRDNAKNSLYLQMNSLKAEDTAVY |
| | | | YCARGFPLLRHGAMDYWGQGTLVTVSSGGGGSGGGGSGGGGSDIQMT |
| | | | QSPSSLSASVGDRVTITCKASQNVDTNVAWYQQKPGQAPKSLIYSAS |
| | | | YRYSDVPSRFSGSASGTDFTLTISSVQSEDFATYYCQQYDSYPYTFG |
| | | | CGTKLEIKSGGGGSEVQLVESGGGLVQPGGSLKLSCAASGFTFNKYA |
| | | | MNWVRQAPGKGLEWVARIRSKYNNYATYYADSVKDRFTISRDDSKNT |
| | | | AYLQMNNLKTEDTAVYYCVRHGNFGNSYISYWAYWGQGTLVTVSSGG |
| | | | GGSGGGGSGGGGSQTVVTQEPSLTVSPGGTVTLTCGSSTGAVTSGNY |
| | | | PNWVQQKPGQAPRGLIGGTKFLAPGTPARFSGSLLGGKAALTLSGVQ |
| | | | PEDEAEYYCVLWYSNRWVFGGGTKLTVL |
| 274. | PM_13_CCxCD3- | bispecific | QVQLVESGGGLVKPGESLRLSCAASGFTFSDYYMYWVRQAPGKCLEW |
| | scFc | HLE | VAIISDSTLHTYYSDIIKGRFTISRDNAKNSLYLQMNSLKAEDTAVY |
| | | molecule | YCARGFPLLRHGAMDYWGQGTLVTVSSGGGGSGGGGSGGGGSDIQMT |
| | | | QSPSSLSASVGDRVTITCKASQNVDTNVAWYQQKPGQAPKSLIYSAS |
| | | | YRYSDVPSRFSGSASGTDFTLTISSVQSEDFATYYCQQYDSYPYTFG |
| | | | CGTKLEIKSGGGGSEVQLVESGGGLVQPGGSLKLSCAASGFTFNKYA |
| | | | MNWVRQAPGKGLEWVARIRSKYNNYATYYADSVKDRFTISRDDSKNT |
| | | | AYLQMNNLKTEDTAVYYCVRHGNFGNSYISYWAYWGQGTLVTVSSGG |
| | | | GGSGGGGSGGGGSQTVVTQEPSLTVSPGGTVTLTCGSSTGAVTSGNY |
| | | | PNWVQQKPGQAPRGLIGGTKFLAPGTPARFSGSLLGGKAALTLSGVQ |
| | | | PEDEAEYYCVLWYSNRWVFGGGTKLTVLGGGGDKTHTCPPCPAPELL |
| | | | GGPSVFLFPPKPKDTLMISRTPEVTCVVVDVSHEDPEVKFNWYVDGV |
| | | | EVHNAKTKPCEEQYGSTYRCVSVLTVLHQDWLNGKEYKCKVSNKALP |
| | | | APIEKTISKAKGQPREPQVYTLPPSREEMTKNQVSLTCLVKGFYPSD |
| | | | IAVEWESNGQPENNYKTTPPVLDSDGSFFLYSKLTVDKSRWQQGNVF |
| | | | SCSVMHEALHNHYTQKSLSLSPGKGGGGSGGGGSGGGGSGGGGSGGG |
| | | | GSGGGGSDKTHTCPPCPAPELLGGPSVFLFPPKPKDTLMISRTPEVT |
| | | | CVVVDVSHEDPEVKFNWYVDGVEVHNAKTKPCEEQYGSTYRCVSVLT |
| | | | VLHQDWLNGKEYKCKVSNKALPAPIEKTISKAKGQPREPQVYTLPPS |
| | | | REEMTKNQVSLTCLVKGFYPSDIAVEWESNGQPENNYKTTPPVLDSD |
| | | | GSFFLYSKLTVDKSRWQQGNVFSCSVMHEALHNHYTQKSLSLSPGK |
| 275. | PM_13_CCxCD3- | bispecific | QVQLVESGGGLVKPGESLRLSCAASGFTFSDYYMYWVRQAPGKCLEW |
| | scFc_delGK | HLE | VAIISDSTLHTYYSDIIKGRFTISRDNAKNSLYLQMNSLKAEDTAVY |
| | | molecule | YCARGFPLLRHGAMDYWGQGTLVTVSSGGGGSGGGGSGGGGSDIQMT |
| | | | QSPSSLSASVGDRVTITCKASQNVDTNVAWYQQKPGQAPKSLIYSAS |
| | | | YRYSDVPSRFSGSASGTDFTLTISSVQSEDFATYYCQQYDSYPYTFG |
| | | | CGTKLEIKSGGGGSEVQLVESGGGLVQPGGSLKLSCAASGFTFNKYA |
| | | | MNWVRQAPGKGLEWVARIRSKYNNYATYYADSVKDRFTISRDDSKNT |
| | | | AYLQMNNLKTEDTAVYYCVRHGNFGNSYISYWAYWGQGTLVTVSSGG |
| | | | GGSGGGGSGGGGSQTVVTQEPSLTVSPGGTVTLTCGSSTGAVTSGNY |
| | | | PNWVQQKPGQAPRGLIGGTKFLAPGTPARFSGSLLGGKAALTLSGVQ |
| | | | PEDEAEYYCVLWYSNRWVFGGGTKLTVLGGGGDKTHTCPPCPAPELL |
| | | | GGPSVFLFPPKPKDTLMISRTPEVTCVVVDVSHEDPEVKFNWYVDGV |
| | | | EVHNAKTKPCEEQYGSTYRCVSVLTVLHQDWLNGKEYKCKVSNKALP |
| | | | APIEKTISKAKGQPREPQVYTLPPSREEMTKNQVSLTCLVKGFYPSD |
| | | | IAVEWESNGQPENNYKTTPPVLDSDGSFFLYSKLTVDKSRWQQGNVF |
| | | | SCSVMHEALHNHYTQKSLSLSPGGGGSGGGGSGGGGSGGGGSGGGGS |
| | | | GGGGSDKTHTCPPCPAPELLGGPSVFLFPPKPKDTLMISRTPEVTCV |
| | | | VVDVSHEDPEVKFNWYVDGVEVHNAKTKPCEEQYGSTYRCVSVLTVL |
| | | | HQDWLNGKEYKCKVSNKALPAPIEKTISKAKGQPREPQVYTLPPSRE |
| | | | EMTKNQVSLTCLVKGFYPSDIAVEWESNGQPENNYKTTPPVLDSDGS |
| | | | FFLYSKLTVDKSRWQQGNVFSCSVMHEALHNHYTQKSLSLSPGK |
| 276. | PM_14xCD3- | VH CDR1 | DYYMY |
| | ScFc | | |
| 277. | PM_14xCD3- | VH CDR2 | IISDGGYYTYYSDIIKG |
| | scFc | | |
| 278. | PM_14xCD3- | VH CDR3 | GFPLLRHGAMDY |
| | scFc | | |
| 279. | PM_14xCD3- | VL CDR1 | KASQNVDTNVA |
| | scFc | | |
| 280. | PM_14xCD3- | VL CDR2 | SASYRYS |
| | scFc | | |
| 281. | PM_14xCD3- | VL CDR3 | QQYDAPMGT |
| | scFc | | |
| 282. | PM_14xCD3- | VH | QVQLVESGGGLVKPGESLRLSCAASGFTFSDYYMYWVRQAPGKGLEW |
| | scFc | | VAIISDGGYYTYYSDIIKGRFTISRDNAKNSLYLQMNSLKAEDTAVY |
| | | | YCARGFPLLRHGAMDYWGQGTLVTVSS |
| 283. | PM_14xCD3- | VL | DIQMTQSPSSLSASVGDRVTITCKASQNVDTNVAWYQQKPGQAPKSL |
| | scFc | | IYSASYRYSDVPSRFSGSASGTDFTLTISSVQSEDFATYYCQQYDAP |
| | | | MGTFGGGTKLEIK |
| 284. | PM_14xCD3- | scFv | QVQLVESGGGLVKPGESLRLSCAASGFTFSDYYMYWVRQAPGKGLEW |
| | scFc | | VAIISDGGYYTYYSDIIKGRFTISRDNAKNSLYLQMNSLKAEDTAVY |
| | | | YCARGFPLLRHGAMDYWGQGTLVTVSSGGGGSGGGGSGGGGSDIQMT |
| | | | QSPSSLSASVGDRVTITCKASQNVDTNVAWYQQKPGQAPKSLIYSAS |
| | | | YRYSDVPSRFSGSASGTDFTLTISSVQSEDFATYYCQQYDAPMGTFG |
| | | | GGTKLEIK |
| 285. | PM_14xCD3- | bispecific | QVQLVESGGGLVKPGESLRLSCAASGFTFSDYYMYWVRQAPGKGLEW |
| | scFc | molecule | VAIISDGGYYTYYSDIIKGRFTISRDNAKNSLYLQMNSLKAEDTAVY |
| | | | YCARGFPLLRHGAMDYWGQGTLVTVSSGGGGSGGGGSGGGGSDIQMT |
| | | | QSPSSLSASVGDRVTITCKASQNVDTNVAWYQQKPGQAPKSLIYSAS |
| | | | YRYSDVPSRFSGSASGTDFTLTISSVQSEDFATYYCQQYDAPMGTFG |
| | | | GGTKLEIKSGGGGSEVQLVESGGGLVQPGGSLKLSCAASGFTFNKYA |
| | | | MNWVRQAPGKGLEWVARIRSKYNNYATYYADSVKDRFTISRDDSKNT |
| | | | AYLQMNNLKTEDTAVYYCVRHGNFGNSYISYWAYWGQGTLVTVSSGG |
| | | | GGSGGGGSGGGGSQTVVTQEPSLTVSPGGTVTLTCGSSTGAVTSGNY |
| | | | PNWVQQKPGQAPRGLIGGTKFLAPGTPARFSGSLLGGKAALTLSGVQ |
| | | | PEDEAEYYCVLWYSNRWVFGGGTKLTVL |
| 286. | PM_14xCD3- | bispecific | QVQLVESGGGLVKPGESLRLSCAASGFTFSDYYMYWVRQAPGKGLEW |
| | scFc | HLE | VAIISDGGYYTYYSDIIKGRFTISRDNAKNSLYLQMNSLKAEDTAVY |
| | | molecule | YCARGFPLLRHGAMDYWGQGTLVTVSSGGGGSGGGGSGGGGSDIQMT |
| | | | QSPSSLSASVGDRVTITCKASQNVDTNVAWYQQKPGQAPKSLIYSAS |
| | | | YRYSDVPSRFSGSASGTDFTLTISSVQSEDFATYYCQQYDAPMGTFG |
| | | | GGTKLEIKSGGGGSEVQLVESGGGLVQPGGSLKLSCAASGFTFNKYA |
| | | | MNWVRQAPGKGLEWVARIRSKYNNYATYYADSVKDRFTISRDDSKNT |
| | | | AYLQMNNLKTEDTAVYYCVRHGNFGNSYISYWAYWGQGTLVTVSSGG |
| | | | GGSGGGGSGGGGSQTVVTQEPSLTVSPGGTVTLTCGSSTGAVTSGNY |
| | | | PNWVQQKPGQAPRGLIGGTKFLAPGTPARFSGSLLGGKAALTLSGVQ |
| | | | PEDEAEYYCVLWYSNRWVFGGGTKLTVLGGGGDKTHTCPPCPAPELL |
| | | | GGPSVFLFPPKPKDTLMISRTPEVTCVVVDVSHEDPEVKFNWYVDGV |
| | | | EVHNAKTKPCEEQYGSTYRCVSVLTVLHQDWLNGKEYKCKVSNKALP |
| | | | APIEKTISKAKGQPREPQVYTLPPSREEMTKNQVSLTCLVKGFYPSD |
| | | | IAVEWESNGQPENNYKTTPPVLDSDGSFFLYSKLTVDKSRWQQGNVF |
| | | | SCSVMHEALHNHYTQKSLSLSPGKGGGGSGGGGSGGGGSGGGGSGGG |
| | | | GSGGGGSDKTHTCPPCPAPELLGGPSVFLFPPKPKDTLMISRTPEVT |
| | | | CVVVDVSHEDPEVKFNWYVDGVEVHNAKTKPCEEQYGSTYRCVSVLT |
| | | | VLHQDWLNGKEYKCKVSNKALPAPIEKTISKAKGQPREPQVYTLPPS |
| | | | REEMTKNQVSLTCLVKGFYPSDIAVEWESNGQPENNYKTTPPVLDSD |
| | | | GSFFLYSKLTVDKSRWQQGNVFSCSVMHEALHNHYTQKSLSLSPGK |
| 287. | PM_14xCD3- | bispecific | QVQLVESGGGLVKPGESLRLSCAASGFTFSDYYMYWVRQAPGKGLEW |
| | scFc_delGK | HLE | VAIISDGGYYTYYSDIIKGRFTISRDNAKNSLYLQMNSLKAEDTAVY |
| | | molecule | YCARGFPLLRHGAMDYWGQGTLVTVSSGGGGSGGGGSGGGGSDIQMT |
| | | | QSPSSLSASVGDRVTITCKASQNVDTNVAWYQQKPGQAPKSLIYSAS |
| | | | YRYSDVPSRFSGSASGTDFTLTISSVQSEDFATYYCQQYDAPMGTFG |
| | | | GGTKLEIKSGGGGSEVQLVESGGGLVQPGGSLKLSCAASGFTFNKYA |
| | | | MNWVRQAPGKGLEWVARIRSKYNNYATYYADSVKDRFTISRDDSKNT |
| | | | AYLQMNNLKTEDTAVYYCVRHGNFGNSYISYWAYWGQGTLVTVSSGG |
| | | | GGSGGGGSGGGGSQTVVTQEPSLTVSPGGTVTLTCGSSTGAVTSGNY |
| | | | PNWVQQKPGQAPRGLIGGTKFLAPGTPARFSGSLLGGKAALTLSGVQ |
| | | | PEDEAEYYCVLWYSNRWVFGGGTKLTVLGGGGDKTHTCPPCPAPELL |
| | | | GGPSVFLFPPKPKDTLMISRTPEVTCVVVDVSHEDPEVKFNWYVDGV |
| | | | EVHNAKTKPCEEQYGSTYRCVSVLTVLHQDWLNGKEYKCKVSNKALP |
| | | | APIEKTISKAKGQPREPQVYTLPPSREEMTKNQVSLTCLVKGFYPSD |
| | | | IAVEWESNGQPENNYKTTPPVLDSDGSFFLYSKLTVDKSRWQQGNVF |
| | | | SCSVMHEALHNHYTQKSLSLSPGGGGSGGGGSGGGGSGGGGSGGGGS |
| | | | GGGGSDKTHTCPPCPAPELLGGPSVFLFPPKPKDTLMISRTPEVTCV |
| | | | VVDVSHEDPEVKFNWYVDGVEVHNAKTKPCEEQYGSTYRCVSVLTVL |
| | | | HQDWLNGKEYKCKVSNKALPAPIEKTISKAKGQPREPQVYTLPPSRE |
| | | | EMTKNQVSLTCLVKGFYPSDIAVEWESNGQPENNYKTTPPVLDSDGS |
| | | | FFLYSKLTVDKSRWQQGNVFSCSVMHEALHNHYTQKSLSLSPGK |
| 288. | PM_14_CCxCD3- | VH | QVQLVESGGGLVKPGESLRLSCAASGFTFSDYYMYWVRQAPGKCLEW |
| | scFc | | VAIISDGGYYTYYSDIIKGRFTISRDNAKNSLYLQMNSLKAEDTAVY |
| | | | YCARGFPLLRHGAMDYWGQGTLVTVSS |
| 289. | PM_14_CCxCD3- | VL | DIQMTQSPSSLSASVGDRVTITCKASQNVDTNVAWYQQKPGQAPKSL |
| | scFc | | IYSASYRYSDVPSRFSGSASGTDFTLTISSVQSEDFATYYCQQYDAP |
| | | | MGTFGCGTKLEIK |
| 290. | PM_14_CCxCD3- | scFv | QVQLVESGGGLVKPGESLRLSCAASGFTFSDYYMYWVRQAPGKCLEW |
| | scFc | | VAIISDGGYYTYYSDIIKGRFTISRDNAKNSLYLQMNSLKAEDTAVY |
| | | | YCARGFPLLRHGAMDYWGQGTLVTVSSGGGGSGGGGSGGGGSDIQMT |
| | | | QSPSSLSASVGDRVTITCKASQNVDTNVAWYQQKPGQAPKSLIYSAS |
| | | | YRYSDVPSRFSGSASGTDFTLTISSVQSEDFATYYCQQYDAPMGTFG |
| | | | CGTKLEIK |
| 291. | PM_14_CCxCD3- | bispecific | QVQLVESGGGLVKPGESLRLSCAASGFTFSDYYMYWVRQAPGKCLEW |
| | scFc | molecule | VAIISDGGYYTYYSDIIKGRFTISRDNAKNSLYLQMNSLKAEDTAVY |
| | | | YCARGFPLLRHGAMDYWGQGTLVTVSSGGGGSGGGGSGGGGSDIQMT |
| | | | QSPSSLSASVGDRVTITCKASQNVDTNVAWYQQKPGQAPKSLIYSAS |
| | | | YRYSDVPSRFSGSASGTDFTLTISSVQSEDFATYYCQQYDAPMGTFG |
| | | | CGTKLEIKSGGGGSEVQLVESGGGLVQPGGSLKLSCAASGFTFNKYA |
| | | | MNWVRQAPGKGLEWVARIRSKYNNYATYYADSVKDRFTISRDDSKNT |
| | | | AYLQMNNLKTEDTAVYYCVRHGNFGNSYISYWAYWGQGTLVTVSSGG |
| | | | GGSGGGGSGGGGSQTVVTQEPSLTVSPGGTVTLTCGSSTGAVTSGNY |
| | | | PNWVQQKPGQAPRGLIGGTKFLAPGTPARFSGSLLGGKAALTLSGVQ |
| | | | PEDEAEYYCVLWYSNRWVFGGGTKLTVL |
| 292. | PM_14_CCxCD3- | bispecific | QVQLVESGGGLVKPGESLRLSCAASGFTFSDYYMYWVRQAPGKCLEW |
| | scFc | HLE | VAIISDGGYYTYYSDIIKGRFTISRDNAKNSLYLQMNSLKAEDTAVY |
| | | molecule | YCARGFPLLRHGAMDYWGQGTLVTVSSGGGGSGGGGSGGGGSDIQMT |
| | | | QSPSSLSASVGDRVTITCKASQNVDTNVAWYQQKPGQAPKSLIYSAS |
| | | | YRYSDVPSRFSGSASGTDFTLTISSVQSEDFATYYCQQYDAPMGTFG |
| | | | CGTKLEIKSGGGGSEVQLVESGGGLVQPGGSLKLSCAASGFTFNKYA |
| | | | MNWVRQAPGKGLEWVARIRSKYNNYATYYADSVKDRFTISRDDSKNT |
| | | | AYLQMNNLKTEDTAVYYCVRHGNFGNSYISYWAYWGQGTLVTVSSGG |
| | | | GGSGGGGSGGGGSQTVVTQEPSLTVSPGGTVTLTCGSSTGAVTSGNY |
| | | | PNWVQQKPGQAPRGLIGGTKFLAPGTPARFSGSLLGGKAALTLSGVQ |
| | | | PEDEAEYYCVLWYSNRWVFGGGTKLTVLGGGGDKTHTCPPCPAPELL |
| | | | GGPSVFLFPPKPKDTLMISRTPEVTCVVVDVSHEDPEVKFNWYVDGV |
| | | | EVHNAKTKPCEEQYGSTYRCVSVLTVLHQDWLNGKEYKCKVSNKALP |
| | | | APIEKTISKAKGQPREPQVYTLPPSREEMTKNQVSLTCLVKGFYPSD |
| | | | IAVEWESNGQPENNYKTTPPVLDSDGSFFLYSKLTVDKSRWQQGNVF |
| | | | SCSVMHEALHNHYTQKSLSLSPGKGGGGSGGGGSGGGGSGGGGSGGG |
| | | | GSGGGGSDKTHTCPPCPAPELLGGPSVFLFPPKPKDTLMISRTPEVT |
| | | | CVVVDVSHEDPEVKFNWYVDGVEVHNAKTKPCEEQYGSTYRCVSVLT |
| | | | VLHQDWLNGKEYKCKVSNKALPAPIEKTISKAKGQPREPQVYTLPPS |
| | | | REEMTKNQVSLTCLVKGFYPSDIAVEWESNGQPENNYKTTPPVLDSD |
| | | | GSFFLYSKLTVDKSRWQQGNVFSCSVMHEALHNHYTQKSLSLSPGK |
| 293. | PM_14_CCxC | bispecific | QVQLVESGGGLVKPGESLRLSCAASGFTFSDYYMYWVRQAPGKCLEW |
| | D3- | HLE | VAIISDGGYYTYYSDIIKGRFTISRDNAKNSLYLQMNSLKAEDTAVY |
| | scFc_deIGK | molecule | YCARGFPLLRHGAMDYWGQGTLVTVSSGGGGSGGGGSGGGGSDIQMT |
| | | | QSPSSLSASVGDRVTITCKASQNVDTNVAWYQQKPGQAPKSLIYSAS |
| | | | YRYSDVPSRFSGSASGTDFTLTISSVQSEDFATYYCQQYDAPMGTFG |
| | | | CGTKLEIKSGGGGSEVQLVESGGGLVQPGGSLKLSCAASGFTFNKYA |
| | | | MNWVRQAPGKGLEWVARIRSKYNNYATYYADSVKDRFTISRDDSKNT |
| | | | AYLQMNNLKTEDTAVYYCVRHGNFGNSYISYWAYWGQGTLVTVSSGG |
| | | | GGSGGGGSGGGGSQTVVTQEPSLTVSPGGTVTLTCGSSTGAVTSGNY |
| | | | PNWVQQKPGQAPRGLIGGTKFLAPGTPARFSGSLLGGKAALTLSGVQ |
| | | | PEDEAEYYCVLWYSNRWVFGGGTKLTVLGGGGDKTHTCPPCPAPELL |
| | | | GGPSVFLFPPKPKDTLMISRTPEVTCVVVDVSHEDPEVKFNWYVDGV |
| | | | EVHNAKTKPCEEQYGSTYRCVSVLTVLHQDWLNGKEYKCKVSNKALP |
| | | | APIEKTISKAKGQPREPQVYTLPPSREEMTKNQVSLTCLVKGFYPSD |
| | | | IAVEWESNGQPENNYKTTPPVLDSDGSFFLYSKLTVDKSRWQQGNVF |
| | | | SCSVMHEALHNHYTQKSLSLSPGGGGSGGGGSGGGGSGGGGSGGGGS |
| | | | GGGGSDKTHTCPPCPAPELLGGPSVFLFPPKPKDTLMISRTPEVTCV |
| | | | VVDVSHEDPEVKFNWYVDGVEVHNAKTKPCEEQYGSTYRCVSVLTVL |
| | | | HQDWLNGKEYKCKVSNKALPAPIEKTISKAKGQPREPQVYTLPPSRE |
| | | | EMTKNQVSLTCLVKGFYPSDIAVEWESNGQPENNYKTTPPVLDSDGS |
| | | | FFLYSKLTVDKSRWQQGNVFSCSVMHEALHNHYTQKSLSLSPGK |
| 294. | PM_15xCD3- | VH CDR1 | DYYMN |
| | scFc | | |
| 295. | PM_15xCD3- | VH CDR2 | IISDNKHQTYYSDIIKG |
| | scFc | | |
| 296. | PM_15xCD3- | VH CDR3 | GFPLLRHGAMDY |
| | scFc | | |
| 297. | PM_15xCD3- | VL CDR1 | KASQNVDTNVA |
| | scFc | | |
| 298. | PM_15xCD3- | VL CDR2 | SASYRYS |
| | scFc | | |
| 299. | PM_15xCD3- | VL CDR3 | QQYDSYPYT |
| | scFc | | |
| 300. | PM_15xCD3- | VH | QVQLVESGGGLVKPGESLRLSCAASGFTFSDYYMNWVRQAPGKGLEW |
| | scFc | | VAIISDNKHQTYYSDIIKGRFAISRDNAKNSLYLQMNSLKAEDTAVY |
| | | | YCARGFPLLRHGAMDYWGQGTLVTVSS |
| 301. | PM_15xCD3- | VL | DIQMTQSPSSLSASVGDRVTITCKASQNVDTNVAWYQQKPGQAPKSL |
| | scFc | | SRFSGSASGTDFTLTISSLQSEDFATYYCQQYDSY |
| | | | PYTFGGGTKLEIK |
| 302. | PM_15xCD3- | scFv | QVQLVESGGGLVKPGESLRLSCAASGFTFSDYYMNWVRQAPGKGLEW |
| | scFc | | VAIISDNKHQTYYSDIIKGRFAISRDNAKNSLYLQMNSLKAEDTAVY |
| | | | YCARGFPLLRHGAMDYWGQGTLVTVSSGGGGSGGGGSGGGGSDIQMT |
| | | | QSPSSLSASVGDRVTITCKASQNVDTNVAWYQQKPGQAPKSLIYSAS |
| | | | YRYSDVPSRFSGSASGTDFTLTISSLQSEDFATYYCQQYDSYPYTFG |
| | | | GGTKLEIK |
| 303. | PM_15xCD3- | bispecific | QvQLvESGGGLVKPGESLRLSCAASGFTFSDYYMNWVRQAPGKGLEW |
| | scFc | molecule | VAIISDNKHQTYYSDIIKGRFAISRDNAKNSLYLQMNSLKAEDTAVY |
| | | | YCARGFPLLRHGAMDYWGQGTLVTVSSGGGGSGGGGSGGGGSDIQMT |
| | | | QSPSSLSASVGDRVTITCKASQNVDTNVAWYQQKPGQAPKSLIYSAS |
| | | | YRYSDVPSRFSGSASGTDFTLTISSLQSEDFATYYCQQYDSYPYTFG |
| | | | GGTKLEIKSGGGGSEVQLVESGGGLVQPGGSLKLSCAASGFTFNKYA |
| | | | MNWVRQAPGKGLEWVARIRSKYNNYATYYADSVKDRFTISRDDSKNT |
| | | | AYLQMNNLKTEDTAVYYCVRHGNFGNSYISYWAYWGQGTLVTVSSGG |
| | | | GGSGGGGSGGGGSQTVVTQEPSLTVSPGGTVTLTCGSSTGAVTSGNY |
| | | | PNWVQQKPGQAPRGLIGGTKFLAPGTPARFSGSLLGGKAALTLSGVQ |
| | | | PEDEAEYYCVLWYSNRWVFGGGTKLTVL |
| 304. | PM_15xCD3- | bispecific | QvQLvESGGGLVKPGESLRLSCAASGFTFSDYYMNWVRQAPGKGLEW |
| | scFc | HLE | VAIISDNKHQTYYSDIIKGRFAISRDNAKNSLYLQMNSLKAEDTAVY |
| | | molecule | YCARGFPLLRHGAMDYWGQGTLVTVSSGGGGSGGGGSGGGGSDIQMT |
| | | | QSPSSLSASVGDRVTITCKASQNVDTNVAWYQQKPGQAPKSLIYSAS |
| | | | YRYSDVPSRFSGSASGTDFTLTISSLQSEDFATYYCQQYDSYPYTFG |
| | | | GGTKLEIKSGGGGSEVQLVESGGGLVQPGGSLKLSCAASGFTFNKYA |
| | | | MNWVRQAPGKGLEWVARIRSKYNNYATYYADSVKDRFTISRDDSKNT |
| | | | AYLQMNNLKTEDTAVYYCVRHGNFGNSYISYWAYWGQGTLVTVSSGG |
| | | | GGSGGGGSGGGGSQTVVTQEPSLTVSPGGTVTLTCGSSTGAVTSGNY |
| | | | PNWVQQKPGQAPRGLIGGTKFLAPGTPARFSGSLLGGKAALTLSGVQ |
| | | | PEDEAEYYCVLWYSNRWVFGGGTKLTVLGGGGDKTHTCPPCPAPELL |
| | | | GGPSVFLFPPKPKDTLMISRTPEVTCVVVDVSHEDPEVKFNWYVDGV |
| | | | EVHNAKTKPCEEQYGSTYRCVSVLTVLHQDWLNGKEYKCKVSNKALP |
| | | | APIEKTISKAKGQPREPQVYTLPPSREEMTKNQVSLTCLVKGFYPSD |
| | | | IAVEWESNGQPENNYKTTPPVLDSDGSFFLYSKLTVDKSRWQQGNVF |
| | | | SCSVMHEALHNHYTQKSLSLSPGKGGGGSGGGGSGGGGSGGGGSGGG |
| | | | GSGGGGSDKTHTCPPCPAPELLGGPSVFLFPPKPKDTLMISRTPEVT |
| | | | CVVVDVSHEDPEVKFNWYVDGVEVHNAKTKPCEEQYGSTYRCVSVLT |
| | | | VLHQDWLNGKEYKCKVSNKALPAPIEKTISKAKGQPREPQVYTLPPS |
| | | | REEMTKNQVSLTCLVKGFYPSDIAVEWESNGQPENNYKTTPPVLDSD |
| | | | GSFFLYSKLTVDKSRWQQGNVFSCSVMHEALHNHYTQKSLSLSPGK |
| 305. | PM_15xCD3- | bispecific | QvQLvESGGGLVKPGESLRLSCAASGFTFSDYYMNWVRQAPGKGLEW |
| | scFc_delGK | HLE | VAIISDNKHQTYYSDIIKGRFAISRDNAKNSLYLQMNSLKAEDTAVY |
| | | molecule | YCARGFPLLRHGAMDYWGQGTLVTVSSGGGGSGGGGSGGGGSDIQMT |
| | | | QSPSSLSASVGDRVTITCKASQNVDTNVAWYQQKPGQAPKSLIYSAS |
| | | | YRYSDVPSRFSGSASGTDFTLTISSLQSEDFATYYCQQYDSYPYTFG |
| | | | GGTKLEIKSGGGGSEVQLVESGGGLVQPGGSLKLSCAASGFTFNKYA |
| | | | MNWVRQAPGKGLEWVARIRSKYNNYATYYADSVKDRFTISRDDSKNT |
| | | | AYLQMNNLKTEDTAVYYCVRHGNFGNSYISYWAYWGQGTLVTVSSGG |
| | | | GGSGGGGSGGGGSQTVVTQEPSLTVSPGGTVTLTCGSSTGAVTSGNY |
| | | | PNWVQQKPGQAPRGLIGGTKFLAPGTPARFSGSLLGGKAALTLSGVQ |
| | | | PEDEAEYYCVLWYSNRWVFGGGTKLTVLGGGGDKTHTCPPCPAPELL |
| | | | GGPSVFLFPPKPKDTLMISRTPEVTCVVVDVSHEDPEVKFNWYVDGV |
| | | | EVHNAKTKPCEEQYGSTYRCVSVLTVLHQDWLNGKEYKCKVSNKALP |
| | | | APIEKTISKAKGQPREPQVYTLPPSREEMTKNQVSLTCLVKGFYPSD |
| | | | IAVEWESNGQPENNYKTTPPVLDSDGSFFLYSKLTVDKSRWQQGNVF |
| | | | SCSVMHEALHNHYTQKSLSLSPGGGGSGGGGSGGGGSGGGGSGGGGS |
| | | | GGGGSDKTHTCPPCPAPELLGGPSVFLFPPKPKDTLMISRTPEVTCV |
| | | | VVDVSHEDPEVKFNWYVDGVEVHNAKTKPCEEQYGSTYRCVSVLTVL |
| | | | HQDWLNGKEYKCKVSNKALPAPIEKTISKAKGQPREPQVYTLPPSRE |
| | | | EMTKNQVSLTCLVKGFYPSDIAVEWESNGQPENNYKTTPPVLDSDGS |
| | | | FFLYSKLTVDKSRWQQGNVFSCSVMHEALHNHYTQKSLSLSPGK |
| 306. | PM_15_CCxCD3- | VH | QVQLVESGGGLVKPGESLRLSCAASGFTFSDYYMNWVRQAPGKCLEW |
| | scFc | | VAIISDNKHQTYYSDIIKGRFAISRDNAKNSLYLQMNSLKAEDTAVY |
| | | | YCARGFPLLRHGAMDYWGQGTLVTVSS |
| 307. | PM_15_CCxCD3- | VL | DIQMTQSPSSLSASVGDRVTITCKASQNVDTNVAWYQQKPGQAPKSL |
| | scFc | | IYSASYRYSDVPSRFSGSASGTDFTLTISSLQSEDFATYYCQQYDSY |
| | | | PYTFGCGTKLEIK |
| 308. | PM_15_CCxCD3- | scFv | QVQLVESGGGLVKPGESLRLSCAASGFTFSDYYMNWVRQAPGKCLEW |
| | scFc | | VAIISDNKHQTYYSDIIKGRFAISRDNAKNSLYLQMNSLKAEDTAVY |
| | | | YCARGFPLLRHGAMDYWGQGTLVTVSSGGGGSGGGGSGGGGSDIQMT |
| | | | QSPSSLSASVGDRVTITCKASQNVDTNVAWYQQKPGQAPKSLIYSAS |
| | | | YRYSDVPSRFSGSASGTDFTLTISSLQSEDFATYYCQQYDSYPYTFG |
| | | | CGTKLEIK |
| 309. | PM_15_CCxCD3- | bispecific | QvQLvESGGGLVKPGESLRLSCAASGFTFSDYYMNWVRQAPGKCLEW |
| | scFc | molecule | VAIISDNKHQTYYSDIIKGRFAISRDNAKNSLYLQMNSLKAEDTAVY |
| | | | YCARGFPLLRHGAMDYWGQGTLVTVSSGGGGSGGGGSGGGGSDIQMT |
| | | | QSPSSLSASVGDRVTITCKASQNVDTNVAWYQQKPGQAPKSLIYSAS |
| | | | YRYSDVPSRFSGSASGTDFTLTISSLQSEDFATYYCQQYDSYPYTFG |
| | | | CGTKLEIKSGGGGSEVQLVESGGGLVQPGGSLKLSCAASGFTFNKYA |
| | | | MNWVRQAPGKGLEWVARIRSKYNNYATYYADSVKDRFTISRDDSKNT |
| | | | AYLQMNNLKTEDTAVYYCVRHGNFGNSYISYWAYWGQGTLVTVSSGG |
| | | | GGSGGGGSGGGGSQTVVTQEPSLTVSPGGTVTLTCGSSTGAVTSGNY |
| | | | PNWVQQKPGQAPRGLIGGTKFLAPGTPARFSGSLLGGKAALTLSGVQ |
| | | | PEDEAEYYCVLWYSNRWVFGGGTKLTVL |
| 310. | PM_15_CCxCD3- | bispecific | 4v4LvESGGGLVKPGESLRLSCAASGFTFSDYYMNWVRQAPGKCLEW |
| | scFc | HLE | VAIISDNKHQTYYSDIIKGRFAISRDNAKNSLYLQMNSLKAEDTAVY |
| | | molecule | YCARGFPLLRHGAMDYWGQGTLVTVSSGGGGSGGGGSGGGGSDIQMT |
| | | | QSPSSLSASVGDRVTITCKASQNVDTNVAWYQQKPGQAPKSLIYSAS |
| | | | YRYSDVPSRFSGSASGTDFTLTISSLQSEDFATYYCQQYDSYPYTFG |
| | | | CGTKLEIKSGGGGSEVQLVESGGGLVQPGGSLKLSCAASGFTFNKYA |
| | | | MNWVRQAPGKGLEWVARIRSKYNNYATYYADSVKDRFTISRDDSKNT |
| | | | AYLQMNNLKTEDTAVYYCVRHGNFGNSYISYWAYWGQGTLVTVSSGG |
| | | | GGSGGGGSGGGGSQTVVTQEPSLTVSPGGTVTLTCGSSTGAVTSGNY |
| | | | PNWVQQKPGQAPRGLIGGTKFLAPGTPARFSGSLLGGKAALTLSGVQ |
| | | | PEDEAEYYCVLWYSNRWVFGGGTKLTVLGGGGDKTHTCPPCPAPELL |
| | | | GGPSVFLFPPKPKDTLMISRTPEVTCVVVDVSHEDPEVKFNWYVDGV |
| | | | EVHNAKTKPCEEQYGSTYRCVSVLTVLHQDWLNGKEYKCKVSNKALP |
| | | | APIEKTISKAKGQPREPQVYTLPPSREEMTKNQVSLTCLVKGFYPSD |
| | | | IAVEWESNGQPENNYKTTPPVLDSDGSFFLYSKLTVDKSRWQQGNVF |
| | | | SCSVMHEALHNHYTQKSLSLSPGKGGGGSGGGGSGGGGSGGGGSGGG |
| | | | GSGGGGSDKTHTCPPCPAPELLGGPSVFLFPPKPKDTLMISRTPEVT |
| | | | CVVVDVSHEDPEVKFNWYVDGVEVHNAKTKPCEEQYGSTYRCVSVLT |
| | | | VLHQDWLNGKEYKCKVSNKALPAPIEKTISKAKGQPREPQVYTLPPS |
| | | | REEMTKNQVSLTCLVKGFYPSDIAVEWESNGQPENNYKTTPPVLDSD |
| | | | GSFFLYSKLTVDKSRWQQGNVFSCSVMHEALHNHYTQKSLSLSPGK |
| 311. | PM_15_CCxCD3- | bispecific | QvQLvESGGGLVKPGESLRLSCAASGFTFSDYYMNWVRQAPGKCLEW |
| | scFc_delGK | HLE | VAIISDNKHQTYYSDIIKGRFAISRDNAKNSLYLQMNSLKAEDTAVY |
| | | molecule | YCARGFPLLRHGAMDYWGQGTLVTVSSGGGGSGGGGSGGGGSDIQMT |
| | | | QSPSSLSASVGDRVTITCKASQNVDTNVAWYQQKPGQAPKSLIYSAS |
| | | | YRYSDVPSRFSGSASGTDFTLTISSLQSEDFATYYCQQYDSYPYTFG |
| | | | CGTKLEIKSGGGGSEVQLVESGGGLVQPGGSLKLSCAASGFTFNKYA |
| | | | MNWVRQAPGKGLEWVARIRSKYNNYATYYADSVKDRFTISRDDSKNT |
| | | | AYLQMNNLKTEDTAVYYCVRHGNFGNSYISYWAYWGQGTLVTVSSGG |
| | | | GGSGGGGSGGGGSQTVVTQEPSLTVSPGGTVTLTCGSSTGAVTSGNY |
| | | | PNWVQQKPGQAPRGLIGGTKFLAPGTPARFSGSLLGGKAALTLSGVQ |
| | | | PEDEAEYYCVLWYSNRWVFGGGTKLTVLGGGGDKTHTCPPCPAPELL |
| | | | GGPSVFLFPPKPKDTLMISRTPEVTCVVVDVSHEDPEVKFNWYVDGV |
| | | | EVHNAKTKPCEEQYGSTYRCVSVLTVLHQDWLNGKEYKCKVSNKALP |
| | | | APIEKTISKAKGQPREPQVYTLPPSREEMTKNQVSLTCLVKGFYPSD |
| | | | IAVEWESNGQPENNYKTTPPVLDSDGSFFLYSKLTVDKSRWQQGNVF |
| | | | SCSVMHEALHNHYTQKSLSLSPGGGGSGGGGSGGGGSGGGGSGGGGS |
| | | | GGGGSDKTHTCPPCPAPELLGGPSVFLFPPKPKDTLMISRTPEVTCV |
| | | | VVDVSHEDPEVKFNWYVDGVEVHNAKTKPCEEQYGSTYRCVSVLTVL |
| | | | HQDWLNGKEYKCKVSNKALPAPIEKTISKAKGQPREPQVYTLPPSRE |
| | | | EMTKNQVSLTCLVKGFYPSDIAVEWESNGQPENNYKTTPPVLDSDGS |
| | | | FFLYSKLTVDKSRWQQGNVFSCSVMHEALHNHYTQKSLSLSPGK |
| 312. | PM 76- | VH CDR1 | DYYMY |
| | B10.02 CC x | | |
| | 12C0-scFc | | |
| 313. | PM 76- | VH CDR2 | IISDAGYYTYYSDIIKG |
| | B10.02 CC x | | |
| | 12C0-scFc | | |
| 314. | PM 76- | VH CDR3 | GFPLLRHGAMDY |
| | B10.02 CC x | | |
| | 12C0-scFc | | |
| 315. | PM 76- | VL CDR1 | KASQNVDTNVA |
| | B10.02 CC x | | |
| | 12C0-scFc | | |
| 316. | PM 76- | VL CDR2 | SASYRYS |
| | B10.02 CC x | | |
| | 12C0-scFc | | |
| 317. | PM 76- | VL CDR3 | QQYESYPYT |
| | B10.02 CC x | | |
| | 12C0-scFc | | |
| 318. | PM 76- | VH | QVQLVESGGGLVKPGESLRLSCAASGFTFSDYYMYWVRQAPGKCLEW |
| | B10.02 CC x | | VAIISDAGYYTYYSDIIKGRFTISRDNAKNSLYLQMNSLKAEDTAVY |
| | 12C0-scFc | | YCARGFPLLRHGAMDYWGQGTLVTVSS |
| 319. | PM 76- | VL | DIQMTQSPSSLSASVGDRVTITCKASQNVDTNVAWYQQKPGQAPKSL |
| | 610.02 CC x | | IYSASYRYSDVPSRFSGSASGTDFTLTISSVQSEDFATYYCQQYESY |
| | 12C0-scFc | | PYTFGCGTKLEIK |
| 320. | PM 76- | scFv | QVQLVESGGGLVKPGESLRLSCAASGFTFSDYYMYWVRQAPGKCLEW |
| | B10.02 CC x | | VAIISDAGYYTYYSDIIKGRFTISRDNAKNSLYLQMNSLKAEDTAVY |
| | 12C0 -scFc | | YCARGFPLLRHGAMDYWGQGTLVTVSSGGGGSGGGGSGGGGSDIQMT |
| | | | QSPSSLSASVGDRVTITCKASQNVDTNVAWYQQKPGQAPKSLIYSAS |
| | | | YRYSDVPSRFSGSASGTDFTLTISSVQSEDFATYYCQQYESYPYTFG |
| | | | CGTKLEIK |
| 321. | PM 76- | bispecific | QVQLVESGGGLVKPGESLRLSCAASGFTFSDYYMYWVRQAPGKCLEW |
| | B10.02 CC x | molecule | VAIISDAGYYTYYSDIIKGRFTISRDNAKNSLYLQMNSLKAEDTAVY |
| | 12C0-scFc | | YCARGFPLLRHGAMDYWGQGTLVTVSSGGGGSGGGGSGGGGSDIQMT |
| | | | QSPSSLSASVGDRVTITCKASQNVDTNVAWYQQKPGQAPKSLIYSAS |
| | | | YRYSDVPSRFSGSASGTDFTLTISSVQSEDFATYYCQQYESYPYTFG |
| | | | CGTKLEIKSGGGGSEVQLVESGGGLVQPGGSLKLSCAASGFTFNKYA |
| | | | MNWVRQAPGKGLEWVARIRSKYNNYATYYADSVKDRFTISRDDSKNT |
| | | | AYLQMNNLKTEDTAVYYCVRHGNFGNSYISYWAYWGQGTLVTVSSGG |
| | | | GGSGGGGSGGGGSQTVVTQEPSLTVSPGGTVTLTCGSSTGAVTSGNY |
| | | | PNWVQQKPGQAPRGLIGGTKFLAPGTPARFSGSLLGGKAALTLSGVQ |
| | | | PEDEAEYYCVLWYSNRWVFGGGTKLTVL |
| 322. | PM 76- | bispecific | QVQLVESGGGLVKPGESLRLSCAASGFTFSDYYMYWVRQAPGKCLEW |
| | B10.02 CC x | HLE | VAIISDAGYYTYYSDIIKGRFTISRDNAKNSLYLQMNSLKAEDTAVY |
| | 12C0-scFc | molecule | YCARGFPLLRHGAMDYWGQGTLVTVSSGGGGSGGGGSGGGGSDIQMT |
| | | | QSPSSLSASVGDRVTITCKASQNVDTNVAWYQQKPGQAPKSLIYSAS |
| | | | YRYSDVPSRFSGSASGTDFTLTISSVQSEDFATYYCQQYESYPYTFG |
| | | | CGTKLEIKSGGGGSEVQLVESGGGLVQPGGSLKLSCAASGFTFNKYA |
| | | | MNWVRQAPGKGLEWVARIRSKYNNYATYYADSVKDRFTISRDDSKNT |
| | | | AYLQMNNLKTEDTAVYYCVRHGNFGNSYISYWAYWGQGTLVTVSSGG |
| | | | GGSGGGGSGGGGSQTVVTQEPSLTVSPGGTVTLTCGSSTGAVTSGNY |
| | | | PNWVQQKPGQAPRGLIGGTKFLAPGTPARFSGSLLGGKAALTLSGVQ |
| | | | PEDEAEYYCVLWYSNRWVFGGGTKLTVLGGGGDKTHTCPPCPAPELL |
| | | | GGPSVFLFPPKPKDTLMISRTPEVTCVVVDVSHEDPEVKFNWYVDGV |
| | | | EVHNAKTKPCEEQYGSTYRCVSVLTVLHQDWLNGKEYKCKVSNKALP |
| | | | APIEKTISKAKGQPREPQVYTLPPSREEMTKNQVSLTCLVKGFYPSD |
| | | | IAVEWESNGQPENNYKTTPPVLDSDGSFFLYSKLTVDKSRWQQGNVF |
| | | | SCSVMHEALHNHYTQKSLSLSPGKGGGGSGGGGSGGGGSGGGGSGGG |
| | | | GSGGGGSDKTHTCPPCPAPELLGGPSVFLFPPKPKDTLMISRTPEVT |
| | | | CVVVDVSHEDPEVKFNWYVDGVEVHNAKTKPCEEQYGSTYRCVSVLT |
| | | | VLHQDWLNGKEYKCKVSNKALPAPIEKTISKAKGQPREPQVYTLPPS |
| | | | REEMTKNQVSLTCLVKGFYPSDIAVEWESNGQPENNYKTTPPVLDSD |
| | | | GSFFLYSKLTVDKSRWQQGNVFSCSVMHEALHNHYTQKSLSLSPGK |
| 323. | PM 76- | bispecific | QVQLVESGGGLVKPGESLRLSCAASGFTFSDYYMYWVRQAPGKCLEW |
| | B10.02 CC x | HLE | VAIISDAGYYTYYSDIIKGRFTISRDNAKNSLYLQMNSLKAEDTAVY |
| | 12C0- | molecule | YCARGFPLLRHGAMDYWGQGTLVTVSSGGGGSGGGGSGGGGSDIQMT |
| | scFc_delGK | | QSPSSLSASVGDRVTITCKASQNVDTNVAWYQQKPGQAPKSLIYSAS |
| | | | YRYSDVPSRFSGSASGTDFTLTISSVQSEDFATYYCQQYESYPYTFG |
| | | | CGTKLEIKSGGGGSEVQLVESGGGLVQPGGSLKLSCAASGFTFNKYA |
| | | | MNWVRQAPGKGLEWVARIRSKYNNYATYYADSVKDRFTISRDDSKNT |
| | | | AYLQMNNLKTEDTAVYYCVRHGNFGNSYISYWAYWGQGTLVTVSSGG |
| | | | GGSGGGGSGGGGSQTVVTQEPSLTVSPGGTVTLTCGSSTGAVTSGNY |
| | | | PNWVQQKPGQAPRGLIGGTKFLAPGTPARFSGSLLGGKAALTLSGVQ |
| | | | PEDEAEYYCVLWYSNRWVFGGGTKLTVLGGGGDKTHTCPPCPAPELL |
| | | | GGPSVFLFPPKPKDTLMISRTPEVTCVVVDVSHEDPEVKFNWYVDGV |
| | | | EVHNAKTKPCEEQYGSTYRCVSVLTVLHQDWLNGKEYKCKVSNKALP |
| | | | APIEKTISKAKGQPREPQVYTLPPSREEMTKNQVSLTCLVKGFYPSD |
| | | | IAVEWESNGQPENNYKTTPPVLDSDGSFFLYSKLTVDKSRWQQGNVF |
| | | | SCSVMHEALHNHYTQKSLSLSPGGGGSGGGGSGGGGSGGGGSGGGGS |
| | | | GGGGSDKTHTCPPCPAPELLGGPSVFLFPPKPKDTLMISRTPEVTCV |
| | | | VVDVSHEDPEVKFNWYVDGVEVHNAKTKPCEEQYGSTYRCVSVLTVL |
| | | | HQDWLNGKEYKCKVSNKALPAPIEKTISKAKGQPREPQVYTLPPSRE |
| | | | EMTKNQVSLTCLVKGFYPSDIAVEWESNGQPENNYKTTPPVLDSDGS |
| | | | FFLYSKLTVDKSRWQQGNVFSCSVMHEALHNHYTQKSLSLSPGK |
| 324. | PM 76- | bispecific | QVQLVESGGGLVKPGESLRLSCAASGFTFSDYYMYWVRQAPGKCLEW |
| | B10.02 CC x | molecule | VAIISDAGYYTYYSDIIKGRFTISRDNAKNSLYLQMNSLKAEDTAVY |
| | 12C0 CC | | YCARGFPLLRHGAMDYWGQGTLVTVSSGGGGSGGGGSGGGGSDIQMT |
| | (103/43)-scFc | | QSPSSLSASVGDRVTITCKASQNVDTNVAWYQQKPGQAPKSLIYSAS |
| | | | YRYSDVPSRFSGSASGTDFTLTISSVQSEDFATYYCQQYESYPYTFG |
| | | | CGTKLEIKSGGGGSEVQLVESGGGLVQPGGSLKLSCAASGFTFNKYA |
| | | | MNWVRQAPGKGLEWVARIRSKYNNYATYYADSVKDRFTISRDDSKNT |
| | | | AYLQMNNLKTEDTAVYYCVRHGNFGNSYISYWAYCGQGTLVTVSSGG |
| | | | GGSGGGGSGGGGSQTVVTQEPSLTVSPGGTVTLTCGSSTGAVTSGNY |
| | | | PNWVQQKPGQCPRGLIGGTKFLAPGTPARFSGSLLGGKAALTLSGVQ |
| | | | PEDEAEYYCVLWYSNRWVFGGGTKLTVL |
| 325. | PM 76- | bispecific | QVQLVESGGGLVKPGESLRLSCAASGFTFSDYYMYWVRQAPGKCLEW |
| | B10.02 CC x | HLE | VAIISDAGYYTYYSDIIKGRFTISRDNAKNSLYLQMNSLKAEDTAVY |
| | 12C0 CC | molecule | YCARGFPLLRHGAMDYWGQGTLVTVSSGGGGSGGGGSGGGGSDIQMT |
| | (103/43)-scFc | | QSPSSLSASVGDRVTITCKASQNVDTNVAWYQQKPGQAPKSLIYSAS |
| | | | YRYSDVPSRFSGSASGTDFTLTISSVQSEDFATYYCQQYESYPYTFG |
| | | | CGTKLEIKSGGGGSEVQLVESGGGLVQPGGSLKLSCAASGFTFNKYA |
| | | | MNWVRQAPGKGLEWVARIRSKYNNYATYYADSVKDRFTISRDDSKNT |
| | | | AYLQMNNLKTEDTAVYYCVRHGNFGNSYISYWAYCGQGTLVTVSSGG |
| | | | GGSGGGGSGGGGSQTVVTQEPSLTVSPGGTVTLTCGSSTGAVTSGNY |
| | | | PNWVQQKPGQCPRGLIGGTKFLAPGTPARFSGSLLGGKAALTLSGVQ |
| | | | PEDEAEYYCVLWYSNRWVFGGGTKLTVLGGGGDKTHTCPPCPAPELL |
| | | | GGPSVFLFPPKPKDTLMISRTPEVTCVVVDVSHEDPEVKFNWYVDGV |
| | | | EVHNAKTKPCEEQYGSTYRCVSVLTVLHQDWLNGKEYKCKVSNKALP |
| | | | APIEKTISKAKGQPREPQVYTLPPSREEMTKNQVSLTCLVKGFYPSD |
| | | | IAVEWESNGQPENNYKTTPPVLDSDGSFFLYSKLTVDKSRWQQGNVF |
| | | | SCSVMHEALHNHYTQKSLSLSPGKGGGGSGGGGSGGGGSGGGGSGGG |
| | | | GSGGGGSDKTHTCPPCPAPELLGGPSVFLFPPKPKDTLMISRTPEVT |
| | | | CVVVDVSHEDPEVKFNWYVDGVEVHNAKTKPCEEQYGSTYRCVSVLT |
| | | | VLHQDWLNGKEYKCKVSNKALPAPIEKTISKAKGQPREPQVYTLPPS |
| | | | REEMTKNQVSLTCLVKGFYPSDIAVEWESNGQPENNYKTTPPVLDSD |
| | | | GSFFLYSKLTVDKSRWQQGNVFSCSVMHEALHNHYTQKSLSLSPGK |
| 326. | PM 76- | bispecific | QVQLVESGGGLVKPGESLRLSCAASGFTFSDYYMYWVRQAPGKCLEW |
| | B10.02 CC x | HLE | VAIISDAGYYTYYSDIIKGRFTISRDNAKNSLYLQMNSLKAEDTAVY |
| | 12C0 CC | molecule | YCARGFPLLRHGAMDYWGQGTLVTVSSGGGGSGGGGSGGGGSDIQMT |
| | (103/43)- | | QSPSSLSASVGDRVTITCKASQNVDTNVAWYQQKPGQAPKSLIYSAS |
| | scFc_delGK | | YRYSDVPSRFSGSASGTDFTLTISSVQSEDFATYYCQQYESYPYTFG |
| | | | CGTKLEIKSGGGGSEVQLVESGGGLVQPGGSLKLSCAASGFTFNKYA |
| | | | MNWVRQAPGKGLEWVARIRSKYNNYATYYADSVKDRFTISRDDSKNT |
| | | | AYLQMNNLKTEDTAVYYCVRHGNFGNSYISYWAYCGQGTLVTVSSGG |
| | | | GGSGGGGSGGGGSQTVVTQEPSLTVSPGGTVTLTCGSSTGAVTSGNY |
| | | | PNWVQQKPGQCPRGLIGGTKFLAPGTPARFSGSLLGGKAALTLSGVQ |
| | | | PEDEAEYYCVLWYSNRWVFGGGTKLTVLGGGGDKTHTCPPCPAPELL |
| | | | GGPSVFLFPPKPKDTLMISRTPEVTCVVVDVSHEDPEVKFNWYVDGV |
| | | | EVHNAKTKPCEEQYGSTYRCVSVLTVLHQDWLNGKEYKCKVSNKALP |
| | | | APIEKTISKAKGQPREPQVYTLPPSREEMTKNQVSLTCLVKGFYPSD |
| | | | IAVEWESNGQPENNYKTTPPVLDSDGSFFLYSKLTVDKSRWQQGNVF |
| | | | SCSVMHEALHNHYTQKSLSLSPGGGGSGGGGSGGGGSGGGGSGGGGS |
| | | | GGGGSDKTHTCPPCPAPELLGGPSVFLFPPKPKDTLMISRTPEVTCV |
| | | | VVDVSHEDPEVKFNWYVDGVEVHNAKTKPCEEQYGSTYRCVSVLTVL |
| | | | HQDWLNGKEYKCKVSNKALPAPIEKTISKAKGQPREPQVYTLPPSRE |
| | | | EMTKNQVSLTCLVKGFYPSDIAVEWESNGQPENNYKTTPPVLDSDGS |
| | | | FFLYSKLTVDKSRWQQGNVFSCSVMHEALHNHYTQKSLSLSPGK |
| 327. | PM 76- | VH CDR1 | DYYMY |
| | B10.08 x | | |
| | 12C0-scFc | | |
| 328. | PM 76- | VH CDR2 | IISDGGYYTYYSDIIKG |
| | B10.08 x | | |
| | 12C0-scFc | | |
| 329. | PM 76- | VH CDR3 | GFPLLRHGAMDY |
| | B10.08 x | | |
| | 12C0-scFc | | |
| 330. | PM 76- | VL CDR1 | KASQNVDTNVA |
| | B10.08 x | | |
| | 12C0-scFc | | |
| 331. | PM 76- | VL CDR2 | SASYRYS |
| | B10.08 x | | |
| | 12C0-scFc | | |
| 332. | PM 76- | VL CDR3 | QQYDQQLIT |
| | B10.08 x | | |
| | 12C0-scFc | | |
| 333. | PM 76- | VH | QVQLVESGGGLVKPGESLRLSCAASGFTFSDYYMYWVRQAPGKGLEW |
| | 610.08 x | | VAIISDGGYYTYYSDIIKGRFTISRDNAKNSLYLQMNSLKAEDTAVY |
| | 12C0-scFc | | YCARGFPLLRHGAMDYWGQGTLVTVSS |
| 334. | PM 76- | VL | DIQMTQSPSSLSASVGDRVTITCKASQNVDTNVAWYQQKPGQAPKSL |
| | 610.08 x | | IYSASYRYSDVPSRFSGSASGTDFTLTISSVQSEDFATYYCQQYDQQ |
| | 12C0-scFc | | LITFGGGTKLEIK |
| 335. | PM 76- | scFv | QVQLVESGGGLVKPGESLRLSCAASGFTFSDYYMYWVRQAPGKGLEW |
| | B10.08 x | | VAIISDGGYYTYYSDIIKGRFTISRDNAKNSLYLQMNSLKAEDTAVY |
| | 12C0 -scFc | | YCARGFPLLRHGAMDYWGQGTLVTVSSGGGGSGGGGSGGGGSDIQMT |
| | | | QSPSSLSASVGDRVTITCKASQNVDTNVAWYQQKPGQAPKSLIYSAS |
| | | | YRYSDVPSRFSGSASGTDFTLTISSVQSEDFATYYCQQYDQQLITFG |
| | | | GGTKLEIK |
| 336. | PM 76- | bispecific | QVQLVESGGGLVKPGESLRLSCAASGFTFSDYYMYWVRQAPGKGLEW |
| | B10.08 x | molecule | VAIISDGGYYTYYSDIIKGRFTISRDNAKNSLYLQMNSLKAEDTAVY |
| | 12C0-scFc | | YCARGFPLLRHGAMDYWGQGTLVTVSSGGGGSGGGGSGGGGSDIQMT |
| | | | QSPSSLSASVGDRVTITCKASQNVDTNVAWYQQKPGQAPKSLIYSAS |
| | | | YRYSDVPSRFSGSASGTDFTLTISSVQSEDFATYYCQQYDQQLITFG |
| | | | GGTKLEIKSGGGGSEVQLVESGGGLVQPGGSLKLSCAASGFTFNKYA |
| | | | MNWVRQAPGKGLEWVARIRSKYNNYATYYADSVKDRFTISRDDSKNT |
| | | | AYLQMNNLKTEDTAVYYCVRHGNFGNSYISYWAYWGQGTLVTVSSGG |
| | | | GGSGGGGSGGGGSQTVVTQEPSLTVSPGGTVTLTCGSSTGAVTSGNY |
| | | | PNWVQQKPGQAPRGLIGGTKFLAPGTPARFSGSLLGGKAALTLSGVQ |
| | | | PEDEAEYYCVLWYSNRWVFGGGTKLTVL |
| 337. | PM 76- | bispecific | QVQLVESGGGLVKPGESLRLSCAASGFTFSDYYMYWVRQAPGKGLEW |
| | B10.08 x | HLE | VAIISDGGYYTYYSDIIKGRFTISRDNAKNSLYLQMNSLKAEDTAVY |
| | 12C0-scFc | molecule | YCARGFPLLRHGAMDYWGQGTLVTVSSGGGGSGGGGSGGGGSDIQMT |
| | | | QSPSSLSASVGDRVTITCKASQNVDTNVAWYQQKPGQAPKSLIYSAS |
| | | | YRYSDVPSRFSGSASGTDFTLTISSVQSEDFATYYCQQYDQQLITFG |
| | | | GGTKLEIKSGGGGSEVQLVESGGGLVQPGGSLKLSCAASGFTFNKYA |
| | | | MNWVRQAPGKGLEWVARIRSKYNNYATYYADSVKDRFTISRDDSKNT |
| | | | AYLQMNNLKTEDTAVYYCVRHGNFGNSYISYWAYWGQGTLVTVSSGG |
| | | | GGSGGGGSGGGGSQTVVTQEPSLTVSPGGTVTLTCGSSTGAVTSGNY |
| | | | PNWVQQKPGQAPRGLIGGTKFLAPGTPARFSGSLLGGKAALTLSGVQ |
| | | | PEDEAEYYCVLWYSNRWVFGGGTKLTVLGGGGDKTHTCPPCPAPELL |
| | | | GGPSVFLFPPKPKDTLMISRTPEVTCVVVDVSHEDPEVKFNWYVDGV |
| | | | EVHNAKTKPCEEQYGSTYRCVSVLTVLHQDWLNGKEYKCKVSNKALP |
| | | | APIEKTISKAKGQPREPQVYTLPPSREEMTKNQVSLTCLVKGFYPSD |
| | | | IAVEWESNGQPENNYKTTPPVLDSDGSFFLYSKLTVDKSRWQQGNVF |
| | | | SCSVMHEALHNHYTQKSLSLSPGKGGGGSGGGGSGGGGSGGGGSGGG |
| | | | GSGGGGSDKTHTCPPCPAPELLGGPSVFLFPPKPKDTLMISRTPEVT |
| | | | CVVVDVSHEDPEVKFNWYVDGVEVHNAKTKPCEEQYGSTYRCVSVLT |
| | | | VLHQDWLNGKEYKCKVSNKALPAPIEKTISKAKGQPREPQVYTLPPS |
| | | | REEMTKNQVSLTCLVKGFYPSDIAVEWESNGQPENNYKTTPPVLDSD |
| | | | GSFFLYSKLTVDKSRWQQGNVFSCSVMHEALHNHYTQKSLSLSPGK |
| 338. | PM 76- | bispecific | QVQLVESGGGLVKPGESLRLSCAASGFTFSDYYMYWVRQAPGKGLEW |
| | 1310.08 x | HLE | VAIISDGGYYTYYSDIIKGRFTISRDNAKNSLYLQMNSLKAEDTAVY |
| | 12C0- | molecule | YCARGFPLLRHGAMDYWGQGTLVTVSSGGGGSGGGGSGGGGSDIQMT |
| | scFc_delGK | | QSPSSLSASVGDRVTITCKASQNVDTNVAWYQQKPGQAPKSLIYSAS |
| | | | YRYSDVPSRFSGSASGTDFTLTISSVQSEDFATYYCQQYDQQLITFG |
| | | | GGTKLEIKSGGGGSEVQLVESGGGLVQPGGSLKLSCAASGFTFNKYA |
| | | | MNWVRQAPGKGLEWVARIRSKYNNYATYYADSVKDRFTISRDDSKNT |
| | | | AYLQMNNLKTEDTAVYYCVRHGNFGNSYISYWAYWGQGTLVTVSSGG |
| | | | GGSGGGGSGGGGSQTVVTQEPSLTVSPGGTVTLTCGSSTGAVTSGNY |
| | | | PNWVQQKPGQAPRGLIGGTKFLAPGTPARFSGSLLGGKAALTLSGVQ |
| | | | PEDEAEYYCVLWYSNRWVFGGGTKLTVLGGGGDKTHTCPPCPAPELL |
| | | | GGPSVFLFPPKPKDTLMISRTPEVTCVVVDVSHEDPEVKFNWYVDGV |
| | | | EVHNAKTKPCEEQYGSTYRCVSVLTVLHQDWLNGKEYKCKVSNKALP |
| | | | APIEKTISKAKGQPREPQVYTLPPSREEMTKNQVSLTCLVKGFYPSD |
| | | | IAVEWESNGQPENNYKTTPPVLDSDGSFFLYSKLTVDKSRWQQGNVF |
| | | | SCSVMHEALHNHYTQKSLSLSPGGGGSGGGGSGGGGSGGGGSGGGGS |
| | | | GGGGSDKTHTCPPCPAPELLGGPSVFLFPPKPKDTLMISRTPEVTCV |
| | | | VVDVSHEDPEVKFNWYVDGVEVHNAKTKPCEEQYGSTYRCVSVLTVL |
| | | | HQDWLNGKEYKCKVSNKALPAPIEKTISKAKGQPREPQVYTLPPSRE |
| | | | EMTKNQVSLTCLVKGFYPSDIAVEWESNGQPENNYKTTPPVLDSDGS |
| | | | FFLYSKLTVDKSRWQQGNVFSCSVMHEALHNHYTQKSLSLSPGK |
| 339. | PM 76- | bispecific | QVQLVESGGGLVKPGESLRLSCAASGFTFSDYYMYWVRQAPGKGLEW |
| | 1310.08 x 12C0 | molecule | VAIISDGGYYTYYSDIIKGRFTISRDNAKNSLYLQMNSLKAEDTAVY |
| | CC(103/43)- | | YCARGFPLLRHGAMDYWGQGTLVTVSSGGGGSGGGGSGGGGSDIQMT |
| | scFc | | QSPSSLSASVGDRVTITCKASQNVDTNVAWYQQKPGQAPKSLIYSAS |
| | | | YRYSDVPSRFSGSASGTDFTLTISSVQSEDFATYYCQQYDQQLITFG |
| | | | GGTKLEIKSGGGGSEVQLVESGGGLVQPGGSLKLSCAASGFTFNKYA |
| | | | MNWVRQAPGKGLEWVARIRSKYNNYATYYADSVKDRFTISRDDSKNT |
| | | | AYLQMNNLKTEDTAVYYCVRHGNFGNSYISYWAYCGQGTLVTVSSGG |
| | | | GGSGGGGSGGGGSQTVVTQEPSLTVSPGGTVTLTCGSSTGAVTSGNY |
| | | | PNWVQQKPGQCPRGLIGGTKFLAPGTPARFSGSLLGGKAALTLSGVQ |
| | | | PEDEAEYYCVLWYSNRWVFGGGTKLTVL |
| 340. | PM 76- | bispecific | QVQLVESGGGLVKPGESLRLSCAASGFTFSDYYMYWVRQAPGKGLEW |
| | 1310.08 x 12C0 | HLE | VAIISDGGYYTYYSDIIKGRFTISRDNAKNSLYLQMNSLKAEDTAVY |
| | CC (103/43)- | molecule | YCARGFPLLRHGAMDYWGQGTLVTVSSGGGGSGGGGSGGGGSDIQMT |
| | scFc | | QSPSSLSASVGDRVTITCKASQNVDTNVAWYQQKPGQAPKSLIYSAS |
| | | | YRYSDVPSRFSGSASGTDFTLTISSVQSEDFATYYCQQYDQQLITFG |
| | | | GGTKLEIKSGGGGSEVQLVESGGGLVQPGGSLKLSCAASGFTFNKYA |
| | | | MNWVRQAPGKGLEWVARIRSKYNNYATYYADSVKDRFTISRDDSKNT |
| | | | AYLQMNNLKTEDTAVYYCVRHGNFGNSYISYWAYCGQGTLVTVSSGG |
| | | | GGSGGGGSGGGGSQTVVTQEPSLTVSPGGTVTLTCGSSTGAVTSGNY |
| | | | PNWVQQKPGQCPRGLIGGTKFLAPGTPARFSGSLLGGKAALTLSGVQ |
| | | | PEDEAEYYCVLWYSNRWVFGGGTKLTVLGGGGDKTHTCPPCPAPELL |
| | | | GGPSVFLFPPKPKDTLMISRTPEVTCVVVDVSHEDPEVKFNWYVDGV |
| | | | EVHNAKTKPCEEQYGSTYRCVSVLTVLHQDWLNGKEYKCKVSNKALP |
| | | | APIEKTISKAKGQPREPQVYTLPPSREEMTKNQVSLTCLVKGFYPSD |
| | | | IAVEWESNGQPENNYKTTPPVLDSDGSFFLYSKLTVDKSRWQQGNVF |
| | | | SCSVMHEALHNHYTQKSLSLSPGKGGGGSGGGGSGGGGSGGGGSGGG |
| | | | GSGGGGSDKTHTCPPCPAPELLGGPSVFLFPPKPKDTLMISRTPEVT |
| | | | CVVVDVSHEDPEVKFNWYVDGVEVHNAKTKPCEEQYGSTYRCVSVLT |
| | | | VLHQDWLNGKEYKCKVSNKALPAPIEKTISKAKGQPREPQVYTLPPS |
| | | | REEMTKNQVSLTCLVKGFYPSDIAVEWESNGQPENNYKTTPPVLDSD |
| | | | GSFFLYSKLTVDKSRWQQGNVFSCSVMHEALHNHYTQKSLSLSPGK |
| 341. | PM 76- | bispecific | QVQLVESGGGLVKPGESLRLSCAASGFTFSDYYMYWVRQAPGKGLEW |
| | 1310.08 x 12C0 | HLE | VAIISDGGYYTYYSDIIKGRFTISRDNAKNSLYLQMNSLKAEDTAVY |
| | CC (103/43)- | molecule | YCARGFPLLRHGAMDYWGQGTLVTVSSGGGGSGGGGSGGGGSDIQMT |
| | scFc_delGK | | QSPSSLSASVGDRVTITCKASQNVDTNVAWYQQKPGQAPKSLIYSAS |
| | | | YRYSDVPSRFSGSASGTDFTLTISSVQSEDFATYYCQQYDQQLITFG |
| | | | GGTKLEIKSGGGGSEVQLVESGGGLVQPGGSLKLSCAASGFTFNKYA |
| | | | MNWVRQAPGKGLEWVARIRSKYNNYATYYADSVKDRFTISRDDSKNT |
| | | | AYLQMNNLKTEDTAVYYCVRHGNFGNSYISYWAYCGQGTLVTVSSGG |
| | | | GGSGGGGSGGGGSQTVVTQEPSLTVSPGGTVTLTCGSSTGAVTSGNY |
| | | | PNWVQQKPGQCPRGLIGGTKFLAPGTPARFSGSLLGGKAALTLSGVQ |
| | | | PEDEAEYYCVLWYSNRWVFGGGTKLTVLGGGGDKTHTCPPCPAPELL |
| | | | GGPSVFLFPPKPKDTLMISRTPEVTCVVVDVSHEDPEVKFNWYVDGV |
| | | | EVHNAKTKPCEEQYGSTYRCVSVLTVLHQDWLNGKEYKCKVSNKALP |
| | | | APIEKTISKAKGQPREPQVYTLPPSREEMTKNQVSLTCLVKGFYPSD |
| | | | IAVEWESNGQPENNYKTTPPVLDSDGSFFLYSKLTVDKSRWQQGNVF |
| | | | SCSVMHEALHNHYTQKSLSLSPGGGGSGGGGSGGGGSGGGGSGGGGS |
| | | | GGGGSDKTHTCPPCPAPELLGGPSVFLFPPKPKDTLMISRTPEVTCV |
| | | | VVDVSHEDPEVKFNWYVDGVEVHNAKTKPCEEQYGSTYRCVSVLTVL |
| | | | HQDWLNGKEYKCKVSNKALPAPIEKTISKAKGQPREPQVYTLPPSRE |
| | | | EMTKNQVSLTCLVKGFYPSDIAVEWESNGQPENNYKTTPPVLDSDGS |
| | | | FFLYSKLTVDKSRWQQGNVFSCSVMHEALHNHYTQKSLSLSPGK |
| 342. | PM 76- | VH CDR1 | DYYMY |
| | B10.08 CC x | | |
| | 12C0-scFc | | |
| 343. | PM 76- | VH CDR2 | IISDGGYYTYYSDIIKG |
| | B10.08 CC x | | |
| | 12C0-scFc | | |
| 344. | PM 76- | VH CDR3 | GFPLLRHGAMDY |
| | B10.08 CC x | | |
| | 12C0-scFc | | |
| 345. | PM 76- | VL CDR1 | KASQNVDTNVA |
| | B10.08 CC x | | |
| | 12C0-scFc | | |
| 346. | PM 76- | VL CDR2 | SASYRYS |
| | B10.08 CC x | | |
| | 12C0-scFc | | |
| 347. | PM 76- | VL CDR3 | QQYDQQLIT |
| | B10.08 CC x | | |
| | 12C0-scFc | | |
| 348. | PM 76- | VH | QVQLVESGGGLVKPGESLRLSCAASGFTFSDYYMYWVRQAPGKCLEW |
| | 610.08 CC x | | VAIISDGGYYTYYSDIIKGRFTISRDNAKNSLYLQMNSLKAEDTAVY |
| | 12C0-scFc | | YCARGFPLLRHGAMDYWGQGTLVTVSS |
| 349. | PM 76- | VL | DIQMTQSPSSLSASVGDRVTITCKASQNVDTNVAWYQQKPGQAPKSL |
| | 610.08 CC x | | IYSASYRYSDVPSRFSGSASGTDFTLTISSVQSEDFATYYCQQYDQQ |
| | 12C0-scFc | | LITFGCGTKLEIK |
| 350. | PM 76- | scFv | QVQLVESGGGLVKPGESLRLSCAASGFTFSDYYMYWVRQAPGKCLEW |
| | B10.08 CC x | | VAIISDGGYYTYYSDIIKGRFTISRDNAKNSLYLQMNSLKAEDTAVY |
| | 12C0-scFc | | YCARGFPLLRHGAMDYWGQGTLVTVSSGGGGSGGGGSGGGGSDIQMT |
| | | | QSPSSLSASVGDRVTITCKASQNVDTNVAWYQQKPGQAPKSLIYSAS |
| | | | YRYSDVPSRFSGSASGTDFTLTISSVQSEDFATYYCQQYDQQLITFG |
| | | | CGTKLEIK |
| 351. | PM 76- | bispecific | QVQLVESGGGLVKPGESLRLSCAASGFTFSDYYMYWVRQAPGKCLEW |
| | B10.08 CC x | molecule | VAIISDGGYYTYYSDIIKGRFTISRDNAKNSLYLQMNSLKAEDTAVY |
| | 12C0-scFc | | YCARGFPLLRHGAMDYWGQGTLVTVSSGGGGSGGGGSGGGGSDIQMT |
| | | | QSPSSLSASVGDRVTITCKASQNVDTNVAWYQQKPGQAPKSLIYSAS |
| | | | YRYSDVPSRFSGSASGTDFTLTISSVQSEDFATYYCQQYDQQLITFG |
| | | | CGTKLEIKSGGGGSEVQLVESGGGLVQPGGSLKLSCAASGFTFNKYA |
| | | | MNWVRQAPGKGLEWVARIRSKYNNYATYYADSVKDRFTISRDDSKNT |
| | | | AYLQMNNLKTEDTAVYYCVRHGNFGNSYISYWAYWGQGTLVTVSSGG |
| | | | GGSGGGGSGGGGSQTVVTQEPSLTVSPGGTVTLTCGSSTGAVTSGNY |
| | | | PNWVQQKPGQAPRGLIGGTKFLAPGTPARFSGSLLGGKAALTLSGVQ |
| | | | PEDEAEYYCVLWYSNRWVFGGGTKLTVL |
| 352. | PM 76- | bispecific | QVQLVESGGGLVKPGESLRLSCAASGFTFSDYYMYWVRQAPGKCLEW |
| | B10.08 CC x | HLE | VAIISDGGYYTYYSDIIKGRFTISRDNAKNSLYLQMNSLKAEDTAVY |
| | 12C0-scFc | molecule | YCARGFPLLRHGAMDYWGQGTLVTVSSGGGGSGGGGSGGGGSDIQMT |
| | | | QSPSSLSASVGDRVTITCKASQNVDTNVAWYQQKPGQAPKSLIYSAS |
| | | | YRYSDVPSRFSGSASGTDFTLTISSVQSEDFATYYCQQYDQQLITFG |
| | | | CGTKLEIKSGGGGSEVQLVESGGGLVQPGGSLKLSCAASGFTFNKYA |
| | | | MNWVRQAPGKGLEWVARIRSKYNNYATYYADSVKDRFTISRDDSKNT |
| | | | AYLQMNNLKTEDTAVYYCVRHGNFGNSYISYWAYWGQGTLVTVSSGG |
| | | | GGSGGGGSGGGGSQTVVTQEPSLTVSPGGTVTLTCGSSTGAVTSGNY |
| | | | PNWVQQKPGQAPRGLIGGTKFLAPGTPARFSGSLLGGKAALTLSGVQ |
| | | | PEDEAEYYCVLWYSNRWVFGGGTKLTVLGGGGDKTHTCPPCPAPELL |
| | | | GGPSVFLFPPKPKDTLMISRTPEVTCVVVDVSHEDPEVKFNWYVDGV |
| | | | EVHNAKTKPCEEQYGSTYRCVSVLTVLHQDWLNGKEYKCKVSNKALP |
| | | | APIEKTISKAKGQPREPQVYTLPPSREEMTKNQVSLTCLVKGFYPSD |
| | | | IAVEWESNGQPENNYKTTPPVLDSDGSFFLYSKLTVDKSRWQQGNVF |
| | | | SCSVMHEALHNHYTQKSLSLSPGKGGGGSGGGGSGGGGSGGGGSGGG |
| | | | GSGGGGSDKTHTCPPCPAPELLGGPSVFLFPPKPKDTLMISRTPEVT |
| | | | CVVVDVSHEDPEVKFNWYVDGVEVHNAKTKPCEEQYGSTYRCVSVLT |
| | | | VLHQDWLNGKEYKCKVSNKALPAPIEKTISKAKGQPREPQVYTLPPS |
| | | | REEMTKNQVSLTCLVKGFYPSDIAVEWESNGQPENNYKTTPPVLDSD |
| | | | GSFFLYSKLTVDKSRWQQGNVFSCSVMHEALHNHYTQKSLSLSPGK |
| 353. | PM 76- | bispecific | QVQLVESGGGLVKPGESLRLSCAASGFTFSDYYMYWVRQAPGKCLEW |
| | 1310.08 CC x | HLE | VAIISDGGYYTYYSDIIKGRFTISRDNAKNSLYLQMNSLKAEDTAVY |
| | 12C0- | molecule | YCARGFPLLRHGAMDYWGQGTLVTVSSGGGGSGGGGSGGGGSDIQMT |
| | scFc_delGK | | QSPSSLSASVGDRVTITCKASQNVDTNVAWYQQKPGQAPKSLIYSAS |
| | | | YRYSDVPSRFSGSASGTDFTLTISSVQSEDFATYYCQQYDQQLITFG |
| | | | CGTKLEIKSGGGGSEVQLVESGGGLVQPGGSLKLSCAASGFTFNKYA |
| | | | MNWVRQAPGKGLEWVARIRSKYNNYATYYADSVKDRFTISRDDSKNT |
| | | | AYLQMNNLKTEDTAVYYCVRHGNFGNSYISYWAYWGQGTLVTVSSGG |
| | | | GGSGGGGSGGGGSQTVVTQEPSLTVSPGGTVTLTCGSSTGAVTSGNY |
| | | | PNWVQQKPGQAPRGLIGGTKFLAPGTPARFSGSLLGGKAALTLSGVQ |
| | | | PEDEAEYYCVLWYSNRWVFGGGTKLTVLGGGGDKTHTCPPCPAPELL |
| | | | GGPSVFLFPPKPKDTLMISRTPEVTCVVVDVSHEDPEVKFNWYVDGV |
| | | | EVHNAKTKPCEEQYGSTYRCVSVLTVLHQDWLNGKEYKCKVSNKALP |
| | | | APIEKTISKAKGQPREPQVYTLPPSREEMTKNQVSLTCLVKGFYPSD |
| | | | IAVEWESNGQPENNYKTTPPVLDSDGSFFLYSKLTVDKSRWQQGNVF |
| | | | SCSVMHEALHNHYTQKSLSLSPGGGGSGGGGSGGGGSGGGGSGGGGS |
| | | | GGGGSDKTHTCPPCPAPELLGGPSVFLFPPKPKDTLMISRTPEVTCV |
| | | | VVDVSHEDPEVKFNWYVDGVEVHNAKTKPCEEQYGSTYRCVSVLTVL |
| | | | HQDWLNGKEYKCKVSNKALPAPIEKTISKAKGQPREPQVYTLPPSRE |
| | | | EMTKNQVSLTCLVKGFYPSDIAVEWESNGQPENNYKTTPPVLDSDGS |
| | | | FFLYSKLTVDKSRWQQGNVFSCSVMHEALHNHYTQKSLSLSPGK |
| 354. | PM 76- | bispecific | 4v4LvESGGGLVKPGESLRLSCAASGFTFSDYYMYWVRQAPGKCLEW |
| | 1310.08 CC x | molecule | VAIISDGGYYTYYSDIIKGRFTISRDNAKNSLYLQMNSLKAEDTAVY |
| | 12C0 CC | | YCARGFPLLRHGAMDYWGQGTLVTVSSGGGGSGGGGSGGGGSDIQMT |
| | (103/43)-scFc | | QSPSSLSASVGDRVTITCKASQNVDTNVAWYQQKPGQAPKSLIYSAS |
| | | | YRYSDVPSRFSGSASGTDFTLTISSVQSEDFATYYCQQYDQQLITFG |
| | | | CGTKLEIKSGGGGSEVQLVESGGGLVQPGGSLKLSCAASGFTFNKYA |
| | | | MNWVRQAPGKGLEWVARIRSKYNNYATYYADSVKDRFTISRDDSKNT |
| | | | AYLQMNNLKTEDTAVYYCVRHGNFGNSYISYWAYCGQGTLVTVSSGG |
| | | | GGSGGGGSGGGGSQTVVTQEPSLTVSPGGTVTLTCGSSTGAVTSGNY |
| | | | PNWVQQKPGQCPRGLIGGTKFLAPGTPARFSGSLLGGKAALTLSGVQ |
| | | | PEDEAEYYCVLWYSNRWVFGGGTKLTVL |
| 355. | PM 76- | bispecific | QVQLVESGGGLVKPGESLRLSCAASGFTFSDYYMYWVRQAPGKCLEW |
| | 1310.08 CC x | HLE | VAIISDGGYYTYYSDIIKGRFTISRDNAKNSLYLQMNSLKAEDTAVY |
| | 12C0 CC | molecule | YCARGFPLLRHGAMDYWGQGTLVTVSSGGGGSGGGGSGGGGSDIQMT |
| | (103/43)-scFc | | QSPSSLSASVGDRVTITCKASQNVDTNVAWYQQKPGQAPKSLIYSAS |
| | | | YRYSDVPSRFSGSASGTDFTLTISSVQSEDFATYYCQQYDQQLITFG |
| | | | CGTKLEIKSGGGGSEVQLVESGGGLVQPGGSLKLSCAASGFTFNKYA |
| | | | MNWVRQAPGKGLEWVARIRSKYNNYATYYADSVKDRFTISRDDSKNT |
| | | | AYLQMNNLKTEDTAVYYCVRHGNFGNSYISYWAYCGQGTLVTVSSGG |
| | | | GGSGGGGSGGGGSQTVVTQEPSLTVSPGGTVTLTCGSSTGAVTSGNY |
| | | | PNWVQQKPGQCPRGLIGGTKFLAPGTPARFSGSLLGGKAALTLSGVQ |
| | | | PEDEAEYYCVLWYSNRWVFGGGTKLTVLGGGGDKTHTCPPCPAPELL |
| | | | GGPSVFLFPPKPKDTLMISRTPEVTCVVVDVSHEDPEVKFNWYVDGV |
| | | | EVHNAKTKPCEEQYGSTYRCVSVLTVLHQDWLNGKEYKCKVSNKALP |
| | | | APIEKTISKAKGQPREPQVYTLPPSREEMTKNQVSLTCLVKGFYPSD |
| | | | IAVEWESNGQPENNYKTTPPVLDSDGSFFLYSKLTVDKSRWQQGNVF |
| | | | SCSVMHEALHNHYTQKSLSLSPGKGGGGSGGGGSGGGGSGGGGSGGG |
| | | | GSGGGGSDKTHTCPPCPAPELLGGPSVFLFPPKPKDTLMISRTPEVT |
| | | | CVVVDVSHEDPEVKFNWYVDGVEVHNAKTKPCEEQYGSTYRCVSVLT |
| | | | VLHQDWLNGKEYKCKVSNKALPAPIEKTISKAKGQPREPQVYTLPPS |
| | | | REEMTKNQVSLTCLVKGFYPSDIAVEWESNGQPENNYKTTPPVLDSD |
| | | | GSFFLYSKLTVDKSRWQQGNVFSCSVMHEALHNHYTQKSLSLSPGK |
| 356. | PM 76- | bispecific | QVQLVESGGGLVKPGESLRLSCAASGFTFSDYYMYWVRQAPGKCLEW |
| | B10.08 CC x | HLE | VAIISDGGYYTYYSDIIKGRFTISRDNAKNSLYLQMNSLKAEDTAVY |
| | 12C0 CC | molecule | YCARGFPLLRHGAMDYWGQGTLVTVSSGGGGSGGGGSGGGGSDIQMT |
| | (103/43)- | | QSPSSLSASVGDRVTITCKASQNVDTNVAWYQQKPGQAPKSLIYSAS |
| | scFc_delGK | | YRYSDVPSRFSGSASGTDFTLTISSVQSEDFATYYCQQYDQQLITFG |
| | | | CGTKLEIKSGGGGSEVQLVESGGGLVQPGGSLKLSCAASGFTFNKYA |
| | | | MNWVRQAPGKGLEWVARIRSKYNNYATYYADSVKDRFTISRDDSKNT |
| | | | AYLQMNNLKTEDTAVYYCVRHGNFGNSYISYWAYCGQGTLVTVSSGG |
| | | | GGSGGGGSGGGGSQTVVTQEPSLTVSPGGTVTLTCGSSTGAVTSGNY |
| | | | PNWVQQKPGQCPRGLIGGTKFLAPGTPARFSGSLLGGKAALTLSGVQ |
| | | | PEDEAEYYCVLWYSNRWVFGGGTKLTVLGGGGDKTHTCPPCPAPELL |
| | | | GGPSVFLFPPKPKDTLMISRTPEVTCVVVDVSHEDPEVKFNWYVDGV |
| | | | EVHNAKTKPCEEQYGSTYRCVSVLTVLHQDWLNGKEYKCKVSNKALP |
| | | | APIEKTISKAKGQPREPQVYTLPPSREEMTKNQVSLTCLVKGFYPSD |
| | | | IAVEWESNGQPENNYKTTPPVLDSDGSFFLYSKLTVDKSRWQQGNVF |
| | | | SCSVMHEALHNHYTQKSLSLSPGGGGSGGGGSGGGGSGGGGSGGGGS |
| | | | GGGGSDKTHTCPPCPAPELLGGPSVFLFPPKPKDTLMISRTPEVTCV |
| | | | VVDVSHEDPEVKFNWYVDGVEVHNAKTKPCEEQYGSTYRCVSVLTVL |
| | | | HQDWLNGKEYKCKVSNKALPAPIEKTISKAKGQPREPQVYTLPPSRE |
| | | | EMTKNQVSLTCLVKGFYPSDIAVEWESNGQPENNYKTTPPVLDSDGS |
| | | | FFLYSKLTVDKSRWQQGNVFSCSVMHEALHNHYTQKSLSLSPGK |
| 357. | PM 76- | VH CDR1 | DYYMY |
| | 610.11 x | | |
| | 12C0-scFc | | |
| 358. | PM 76- | VH CDR2 | IISDGGYYTYYSDIIKG |
| | 610.11 x | | |
| | 12C0-scFc | | |
| 359. | PM 76- | VH CDR3 | GFPLLRHGAMDY |
| | 610.11 x | | |
| | 12C0-scFc | | |
| 360. | PM 76- | VL CDR1 | KASQNVDTNVA |
| | 610.11 x | | |
| | 12C0-scFc | | |
| 361. | PM 76- | VL CDR2 | SASYVYW |
| | 610.11 x | | |
| | 12C0-scFc | | |
| 362. | PM 76- | VL CDR3 | QQYDQQLIT |
| | 610.11 x | | |
| | 12C0-scFc | | |
| 363. | PM 76- | VH | QVQLVESGGGLVKPGESLRLSCAASGFTFSDYYMYWVRQAPGKGLEW |
| | 610.11 x | | VAIISDGGYYTYYSDIIKGRFTISRDNAKNSLYLQMNSLKAEDTAVY |
| | 12C0-scFc | | YCARGFPLLRHGAMDYWGQGTLVTVSS |
| 364. | PM 76- | VL | DIQMTQSPSSLSASVGDRVTITCKASQNVDTNVAWYQQKPGQAPKSL |
| | 610.11 x | | IYSASYVYWDVPSRFSGSASGTDFTLTISSVQSEDFATYYCQQYDQQ |
| | 12C0-scFc | | LITFGGGTKLEIK |
| 365. | PM 76- | scFv | QVQLVESGGGLVKPGESLRLSCAASGFTFSDYYMYWVRQAPGKGLEW |
| | B10.11 x | | VAIISDGGYYTYYSDIIKGRFTISRDNAKNSLYLQMNSLKAEDTAVY |
| | 12C0-scFc | | YCARGFPLLRHGAMDYWGQGTLVTVSSGGGGSGGGGSGGGGSDIQMT |
| | | | QSPSSLSASVGDRVTITCKASQNVDTNVAWYQQKPGQAPKSLIYSAS |
| | | | YVYWDVPSRFSGSASGTDFTLTISSVQSEDFATYYCQQYDQQLITFG |
| | | | GGTKLEIK |
| 366. | PM 76- | bispecific | QVQLVESGGGLVKPGESLRLSCAASGFTFSDYYMYWVRQAPGKGLEW |
| | B10.11 x | molecule | VAIISDGGYYTYYSDIIKGRFTISRDNAKNSLYLQMNSLKAEDTAVY |
| | 12C0-scFc | | YCARGFPLLRHGAMDYWGQGTLVTVSSGGGGSGGGGSGGGGSDIQMT |
| | | | QSPSSLSASVGDRVTITCKASQNVDTNVAWYQQKPGQAPKSLIYSAS |
| | | | YVYWDVPSRFSGSASGTDFTLTISSVQSEDFATYYCQQYDQQLITFG |
| | | | GGTKLEIKSGGGGSEVQLVESGGGLVQPGGSLKLSCAASGFTFNKYA |
| | | | MNWVRQAPGKGLEWVARIRSKYNNYATYYADSVKDRFTISRDDSKNT |
| | | | AYLQMNNLKTEDTAVYYCVRHGNFGNSYISYWAYWGQGTLVTVSSGG |
| | | | GGSGGGGSGGGGSQTVVTQEPSLTVSPGGTVTLTCGSSTGAVTSGNY |
| | | | PNWVQQKPGQAPRGLIGGTKFLAPGTPARFSGSLLGGKAALTLSGVQ |
| | | | PEDEAEYYCVLWYSNRWVFGGGTKLTVL |
| 367. | PM 76- | bispecific | QVQLVESGGGLVKPGESLRLSCAASGFTFSDYYMYWVRQAPGKGLEW |
| | B10.11 x | HLE | VAIISDGGYYTYYSDIIKGRFTISRDNAKNSLYLQMNSLKAEDTAVY |
| | 12C0-scFc | molecule | YCARGFPLLRHGAMDYWGQGTLVTVSSGGGGSGGGGSGGGGSDIQMT |
| | | | QSPSSLSASVGDRVTITCKASQNVDTNVAWYQQKPGQAPKSLIYSAS |
| | | | YVYWDVPSRFSGSASGTDFTLTISSVQSEDFATYYCQQYDQQLITFG |
| | | | GGTKLEIKSGGGGSEVQLVESGGGLVQPGGSLKLSCAASGFTFNKYA |
| | | | MNWVRQAPGKGLEWVARIRSKYNNYATYYADSVKDRFTISRDDSKNT |
| | | | AYLQMNNLKTEDTAVYYCVRHGNFGNSYISYWAYWGQGTLVTVSSGG |
| | | | GGSGGGGSGGGGSQTVVTQEPSLTVSPGGTVTLTCGSSTGAVTSGNY |
| | | | PNWVQQKPGQAPRGLIGGTKFLAPGTPARFSGSLLGGKAALTLSGVQ |
| | | | PEDEAEYYCVLWYSNRWVFGGGTKLTVLGGGGDKTHTCPPCPAPELL |
| | | | GGPSVFLFPPKPKDTLMISRTPEVTCVVVDVSHEDPEVKFNWYVDGV |
| | | | EVHNAKTKPCEEQYGSTYRCVSVLTVLHQDWLNGKEYKCKVSNKALP |
| | | | APIEKTISKAKGQPREPQVYTLPPSREEMTKNQVSLTCLVKGFYPSD |
| | | | IAVEWESNGQPENNYKTTPPVLDSDGSFFLYSKLTVDKSRWQQGNVF |
| | | | SCSVMHEALHNHYTQKSLSLSPGKGGGGSGGGGSGGGGSGGGGSGGG |
| | | | GSGGGGSDKTHTCPPCPAPELLGGPSVFLFPPKPKDTLMISRTPEVT |
| | | | CVVVDVSHEDPEVKFNWYVDGVEVHNAKTKPCEEQYGSTYRCVSVLT |
| | | | VLHQDWLNGKEYKCKVSNKALPAPIEKTISKAKGQPREPQVYTLPPS |
| | | | REEMTKNQVSLTCLVKGFYPSDIAVEWESNGQPENNYKTTPPVLDSD |
| | | | GSFFLYSKLTVDKSRWQQGNVFSCSVMHEALHNHYTQKSLSLSPGK |
| 368. | PM 76- | bispecific | QVQLVESGGGLVKPGESLRLSCAASGFTFSDYYMYWVRQAPGKGLEW |
| | B10.11 x | HLE | VAIISDGGYYTYYSDIIKGRFTISRDNAKNSLYLQMNSLKAEDTAVY |
| | 12C0- | molecule | YCARGFPLLRHGAMDYWGQGTLVTVSSGGGGSGGGGSGGGGSDIQMT |
| | scFc_delGK | | QSPSSLSASVGDRVTITCKASQNVDTNVAWYQQKPGQAPKSLIYSAS |
| | | | YVYWDVPSRFSGSASGTDFTLTISSVQSEDFATYYCQQYDQQLITFG |
| | | | GGTKLEIKSGGGGSEVQLVESGGGLVQPGGSLKLSCAASGFTFNKYA |
| | | | MNWVRQAPGKGLEWVARIRSKYNNYATYYADSVKDRFTISRDDSKNT |
| | | | AYLQMNNLKTEDTAVYYCVRHGNFGNSYISYWAYWGQGTLVTVSSGG |
| | | | GGSGGGGSGGGGSQTVVTQEPSLTVSPGGTVTLTCGSSTGAVTSGNY |
| | | | PNWVQQKPGQAPRGLIGGTKFLAPGTPARFSGSLLGGKAALTLSGVQ |
| | | | PEDEAEYYCVLWYSNRWVFGGGTKLTVLGGGGDKTHTCPPCPAPELL |
| | | | GGPSVFLFPPKPKDTLMISRTPEVTCVVVDVSHEDPEVKFNWYVDGV |
| | | | EVHNAKTKPCEEQYGSTYRCVSVLTVLHQDWLNGKEYKCKVSNKALP |
| | | | APIEKTISKAKGQPREPQVYTLPPSREEMTKNQVSLTCLVKGFYPSD |
| | | | IAVEWESNGQPENNYKTTPPVLDSDGSFFLYSKLTVDKSRWQQGNVF |
| | | | SCSVMHEALHNHYTQKSLSLSPGGGGSGGGGSGGGGSGGGGSGGGGS |
| | | | GGGGSDKTHTCPPCPAPELLGGPSVFLFPPKPKDTLMISRTPEVTCV |
| | | | VVDVSHEDPEVKFNWYVDGVEVHNAKTKPCEEQYGSTYRCVSVLTVL |
| | | | HQDWLNGKEYKCKVSNKALPAPIEKTISKAKGQPREPQVYTLPPSRE |
| | | | EMTKNQVSLTCLVKGFYPSDIAVEWESNGQPENNYKTTPPVLDSDGS |
| | | | FFLYSKLTVDKSRWQQGNVFSCSVMHEALHNHYTQKSLSLSPGK |
| 369. | PM 76- | bispecific | QVQLVESGGGLVKPGESLRLSCAASGFTFSDYYMYWVRQAPGKGLEW |
| | B10.11 xl2C0 | molecule | VAIISDGGYYTYYSDIIKGRFTISRDNAKNSLYLQMNSLKAEDTAVY |
| | CC (103/43)- | | YCARGFPLLRHGAMDYWGQGTLVTVSSGGGGSGGGGSGGGGSDIQMT |
| | scFc | | QSPSSLSASVGDRVTITCKASQNVDTNVAWYQQKPGQAPKSLIYSAS |
| | | | YVYWDVPSRFSGSASGTDFTLTISSVQSEDFATYYCQQYDQQLITFG |
| | | | GGTKLEIKSGGGGSEVQLVESGGGLVQPGGSLKLSCAASGFTFNKYA |
| | | | MNWVRQAPGKGLEWVARIRSKYNNYATYYADSVKDRFTISRDDSKNT |
| | | | AYLQMNNLKTEDTAVYYCVRHGNFGNSYISYWAYCGQGTLVTVSSGG |
| | | | GGSGGGGSGGGGSQTVVTQEPSLTVSPGGTVTLTCGSSTGAVTSGNY |
| | | | PNWVQQKPGQCPRGLIGGTKFLAPGTPARFSGSLLGGKAALTLSGVQ |
| | | | PEDEAEYYCVLWYSNRWVFGGGTKLTVL |
| 370. | PM 76- | bispecific | QVQLVESGGGLVKPGESLRLSCAASGFTFSDYYMYWVRQAPGKGLEW |
| | B10.11 xl2C0 | HLE | VAIISDGGYYTYYSDIIKGRFTISRDNAKNSLYLQMNSLKAEDTAVY |
| | CC (103/43)- | molecule | YCARGFPLLRHGAMDYWGQGTLVTVSSGGGGSGGGGSGGGGSDIQMT |
| | scFc | | QSPSSLSASVGDRVTITCKASQNVDTNVAWYQQKPGQAPKSLIYSAS |
| | | | YVYWDVPSRFSGSASGTDFTLTISSVQSEDFATYYCQQYDQQLITFG |
| | | | GGTKLEIKSGGGGSEVQLVESGGGLVQPGGSLKLSCAASGFTFNKYA |
| | | | MNWVRQAPGKGLEWVARIRSKYNNYATYYADSVKDRFTISRDDSKNT |
| | | | AYLQMNNLKTEDTAVYYCVRHGNFGNSYISYWAYCGQGTLVTVSSGG |
| | | | GGSGGGGSGGGGSQTVVTQEPSLTVSPGGTVTLTCGSSTGAVTSGNY |
| | | | PNWVQQKPGQCPRGLIGGTKFLAPGTPARFSGSLLGGKAALTLSGVQ |
| | | | PEDEAEYYCVLWYSNRWVFGGGTKLTVLGGGGDKTHTCPPCPAPELL |
| | | | GGPSVFLFPPKPKDTLMISRTPEVTCVVVDVSHEDPEVKFNWYVDGV |
| | | | EVHNAKTKPCEEQYGSTYRCVSVLTVLHQDWLNGKEYKCKVSNKALP |
| | | | APIEKTISKAKGQPREPQVYTLPPSREEMTKNQVSLTCLVKGFYPSD |
| | | | IAVEWESNGQPENNYKTTPPVLDSDGSFFLYSKLTVDKSRWQQGNVF |
| | | | SCSVMHEALHNHYTQKSLSLSPGKGGGGSGGGGSGGGGSGGGGSGGG |
| | | | GSGGGGSDKTHTCPPCPAPELLGGPSVFLFPPKPKDTLMISRTPEVT |
| | | | CVVVDVSHEDPEVKFNWYVDGVEVHNAKTKPCEEQYGSTYRCVSVLT |
| | | | VLHQDWLNGKEYKCKVSNKALPAPIEKTISKAKGQPREPQVYTLPPS |
| | | | REEMTKNQVSLTCLVKGFYPSDIAVEWESNGQPENNYKTTPPVLDSD |
| | | | GSFFLYSKLTVDKSRWQQGNVFSCSVMHEALHNHYTQKSLSLSPGK |
| 371. | PM 76- | bispecific | QVQLVESGGGLVKPGESLRLSCAASGFTFSDYYMYWVRQAPGKGLEW |
| | B10.11 xl2C0 | HLE | VAIISDGGYYTYYSDIIKGRFTISRDNAKNSLYLQMNSLKAEDTAVY |
| | CC (103/43)- | molecule | YCARGFPLLRHGAMDYWGQGTLVTVSSGGGGSGGGGSGGGGSDIQMT |
| | scFc_delGK | | QSPSSLSASVGDRVTITCKASQNVDTNVAWYQQKPGQAPKSLIYSAS |
| | | | YVYWDVPSRFSGSASGTDFTLTISSVQSEDFATYYCQQYDQQLITFG |
| | | | GGTKLEIKSGGGGSEVQLVESGGGLVQPGGSLKLSCAASGFTFNKYA |
| | | | MNWVRQAPGKGLEWVARIRSKYNNYATYYADSVKDRFTISRDDSKNT |
| | | | AYLQMNNLKTEDTAVYYCVRHGNFGNSYISYWAYCGQGTLVTVSSGG |
| | | | GGSGGGGSGGGGSQTVVTQEPSLTVSPGGTVTLTCGSSTGAVTSGNY |
| | | | PNWVQQKPGQCPRGLIGGTKFLAPGTPARFSGSLLGGKAALTLSGVQ |
| | | | PEDEAEYYCVLWYSNRWVFGGGTKLTVLGGGGDKTHTCPPCPAPELL |
| | | | GGPSVFLFPPKPKDTLMISRTPEVTCVVVDVSHEDPEVKFNWYVDGV |
| | | | EVHNAKTKPCEEQYGSTYRCVSVLTVLHQDWLNGKEYKCKVSNKALP |
| | | | APIEKTISKAKGQPREPQVYTLPPSREEMTKNQVSLTCLVKGFYPSD |
| | | | IAVEWESNGQPENNYKTTPPVLDSDGSFFLYSKLTVDKSRWQQGNVF |
| | | | SCSVMHEALHNHYTQKSLSLSPGGGGSGGGGSGGGGSGGGGSGGGGS |
| | | | GGGGSDKTHTCPPCPAPELLGGPSVFLFPPKPKDTLMISRTPEVTCV |
| | | | VVDVSHEDPEVKFNWYVDGVEVHNAKTKPCEEQYGSTYRCVSVLTVL |
| | | | HQDWLNGKEYKCKVSNKALPAPIEKTISKAKGQPREPQVYTLPPSRE |
| | | | EMTKNQVSLTCLVKGFYPSDIAVEWESNGQPENNYKTTPPVLDSDGS |
| | | | FFLYSKLTVDKSRWQQGNVFSCSVMHEALHNHYTQKSLSLSPGK |
| 372. | PM 76- | VH CDR1 | DYYMY |
| | 610.11 CC x | | |
| | 12C0-scFc | | |
| 373. | PM 76- | VH CDR2 | IISDGGYYTYYSDIIKG |
| | 610.11 CC x | | |
| | 12C0-scFc | | |
| 374. | PM 76- | VH CDR3 | GFPLLRHGAMDY |
| | 610.11 CC x | | |
| | 12C0-scFc | | |
| 375. | PM 76- | VL CDR1 | KASQNVDTNVA |
| | 610.11 CC x | | |
| | 12C0-scFc | | |
| 376. | PM 76- | VL CDR2 | SASYVYW |
| | 610.11 CC x | | |
| | 12C0-scFc | | |
| 377. | PM 76- | VL CDR3 | QQYDQQLIT |
| | 610.11 CC x | | |
| | 12C0-scFc | | |
| 378. | PM 76- | VH | QVQLVESGGGLVKPGESLRLSCAASGFTFSDYYMYWVRQAPGKCLEW |
| | 610.11 CC x | | VAIISDGGYYTYYSDIIKGRFTISRDNAKNSLYLQMNSLKAEDTAVY |
| | 12C0-scFc | | YCARGFPLLRHGAMDYWGQGTLVTVSS |
| 379. | PM 76- | VL | DIQMTQSPSSLSASVGDRVTITCKASQNVDTNVAWYQQKPGQAPKSL |
| | 610.11 CC x | | IYSASYVYWDVPSRFSGSASGTDFTLTISSVQSEDFATYYCQQYDQQ |
| | 12C0-scFc | | LITFGCGTKLEIK |
| 380. | PM 76- | scFv | QVQLVESGGGLVKPGESLRLSCAASGFTFSDYYMYWVRQAPGKCLEW |
| | B10.11 CC x | | VAIISDGGYYTYYSDIIKGRFTISRDNAKNSLYLQMNSLKAEDTAVY |
| | 12C0-scFc | | YCARGFPLLRHGAMDYWGQGTLVTVSSGGGGSGGGGSGGGGSDIQMT |
| | | | QSPSSLSASVGDRVTITCKASQNVDTNVAWYQQKPGQAPKSLIYSAS |
| | | | YVYWDVPSRFSGSASGTDFTLTISSVQSEDFATYYCQQYDQQLITFG |
| | | | CGTKLEIK |
| 381. | PM 76- | bispecific | QVQLVESGGGLVKPGESLRLSCAASGFTFSDYYMYWVRQAPGKCLEW |
| | B10.11 CC x | molecule | VAIISDGGYYTYYSDIIKGRFTISRDNAKNSLYLQMNSLKAEDTAVY |
| | 12C0-scFc | | YCARGFPLLRHGAMDYWGQGTLVTVSSGGGGSGGGGSGGGGSDIQMT |
| | | | QSPSSLSASVGDRVTITCKASQNVDTNVAWYQQKPGQAPKSLIYSAS |
| | | | YVYWDVPSRFSGSASGTDFTLTISSVQSEDFATYYCQQYDQQLITFG |
| | | | CGTKLEIKSGGGGSEVQLVESGGGLVQPGGSLKLSCAASGFTFNKYA |
| | | | MNWVRQAPGKGLEWVARIRSKYNNYATYYADSVKDRFTISRDDSKNT |
| | | | AYLQMNNLKTEDTAVYYCVRHGNFGNSYISYWAYWGQGTLVTVSSGG |
| | | | GGSGGGGSGGGGSQTVVTQEPSLTVSPGGTVTLTCGSSTGAVTSGNY |
| | | | PNWVQQKPGQAPRGLIGGTKFLAPGTPARFSGSLLGGKAALTLSGVQ |
| | | | PEDEAEYYCVLWYSNRWVFGGGTKLTVL |
| 382. | PM 76- | bispecific | QVQLVESGGGLVKPGESLRLSCAASGFTFSDYYMYWVRQAPGKCLEW |
| | B10.11 CC x | HLE | VAIISDGGYYTYYSDIIKGRFTISRDNAKNSLYLQMNSLKAEDTAVY |
| | 12C0-scFc | molecule | YCARGFPLLRHGAMDYWGQGTLVTVSSGGGGSGGGGSGGGGSDIQMT |
| | | | QSPSSLSASVGDRVTITCKASQNVDTNVAWYQQKPGQAPKSLIYSAS |
| | | | YVYWDVPSRFSGSASGTDFTLTISSVQSEDFATYYCQQYDQQLITFG |
| | | | CGTKLEIKSGGGGSEVQLVESGGGLVQPGGSLKLSCAASGFTFNKYA |
| | | | MNWVRQAPGKGLEWVARIRSKYNNYATYYADSVKDRFTISRDDSKNT |
| | | | AYLQMNNLKTEDTAVYYCVRHGNFGNSYISYWAYWGQGTLVTVSSGG |
| | | | GGSGGGGSGGGGSQTVVTQEPSLTVSPGGTVTLTCGSSTGAVTSGNY |
| | | | PNWVQQKPGQAPRGLIGGTKFLAPGTPARFSGSLLGGKAALTLSGVQ |
| | | | PEDEAEYYCVLWYSNRWVFGGGTKLTVLGGGGDKTHTCPPCPAPELL |
| | | | GGPSVFLFPPKPKDTLMISRTPEVTCVVVDVSHEDPEVKFNWYVDGV |
| | | | EVHNAKTKPCEEQYGSTYRCVSVLTVLHQDWLNGKEYKCKVSNKALP |
| | | | APIEKTISKAKGQPREPQVYTLPPSREEMTKNQVSLTCLVKGFYPSD |
| | | | IAVEWESNGQPENNYKTTPPVLDSDGSFFLYSKLTVDKSRWQQGNVF |
| | | | SCSVMHEALHNHYTQKSLSLSPGKGGGGSGGGGSGGGGSGGGGSGGG |
| | | | GSGGGGSDKTHTCPPCPAPELLGGPSVFLFPPKPKDTLMISRTPEVT |
| | | | CVVVDVSHEDPEVKFNWYVDGVEVHNAKTKPCEEQYGSTYRCVSVLT |
| | | | VLHQDWLNGKEYKCKVSNKALPAPIEKTISKAKGQPREPQVYTLPPS |
| | | | REEMTKNQVSLTCLVKGFYPSDIAVEWESNGQPENNYKTTPPVLDSD |
| | | | GSFFLYSKLTVDKSRWQQGNVFSCSVMHEALHNHYTQKSLSLSPGK |
| 383. | PM 76- | bispecific | QVQLVESGGGLVKPGESLRLSCAASGFTFSDYYMYWVRQAPGKCLEW |
| | B10.11 CC x | HLE | VAIISDGGYYTYYSDIIKGRFTISRDNAKNSLYLQMNSLKAEDTAVY |
| | 12C0- | molecule | YCARGFPLLRHGAMDYWGQGTLVTVSSGGGGSGGGGSGGGGSDIQMT |
| | scFc_delGK | | QSPSSLSASVGDRVTITCKASQNVDTNVAWYQQKPGQAPKSLIYSAS |
| | | | YVYWDVPSRFSGSASGTDFTLTISSVQSEDFATYYCQQYDQQLITFG |
| | | | CGTKLEIKSGGGGSEVQLVESGGGLVQPGGSLKLSCAASGFTFNKYA |
| | | | MNWVRQAPGKGLEWVARIRSKYNNYATYYADSVKDRFTISRDDSKNT |
| | | | AYLQMNNLKTEDTAVYYCVRHGNFGNSYISYWAYWGQGTLVTVSSGG |
| | | | GGSGGGGSGGGGSQTVVTQEPSLTVSPGGTVTLTCGSSTGAVTSGNY |
| | | | PNWVQQKPGQAPRGLIGGTKFLAPGTPARFSGSLLGGKAALTLSGVQ |
| | | | PEDEAEYYCVLWYSNRWVFGGGTKLTVLGGGGDKTHTCPPCPAPELL |
| | | | GGPSVFLFPPKPKDTLMISRTPEVTCVVVDVSHEDPEVKFNWYVDGV |
| | | | EVHNAKTKPCEEQYGSTYRCVSVLTVLHQDWLNGKEYKCKVSNKALP |
| | | | APIEKTISKAKGQPREPQVYTLPPSREEMTKNQVSLTCLVKGFYPSD |
| | | | IAVEWESNGQPENNYKTTPPVLDSDGSFFLYSKLTVDKSRWQQGNVF |
| | | | SCSVMHEALHNHYTQKSLSLSPGGGGSGGGGSGGGGSGGGGSGGGGS |
| | | | GGGGSDKTHTCPPCPAPELLGGPSVFLFPPKPKDTLMISRTPEVTCV |
| | | | VVDVSHEDPEVKFNWYVDGVEVHNAKTKPCEEQYGSTYRCVSVLTVL |
| | | | HQDWLNGKEYKCKVSNKALPAPIEKTISKAKGQPREPQVYTLPPSRE |
| | | | EMTKNQVSLTCLVKGFYPSDIAVEWESNGQPENNYKTTPPVLDSDGS |
| | | | FFLYSKLTVDKSRWQQGNVFSCSVMHEALHNHYTQKSLSLSPGK |
| 384. | PM 76- | bispecific | QVQLVESGGGLVKPGESLRLSCAASGFTFSDYYMYWVRQAPGKCLEW |
| | B10.11 CC x | molecule | VAIISDGGYYTYYSDIIKGRFTISRDNAKNSLYLQMNSLKAEDTAVY |
| | 12C0 CC | | YCARGFPLLRHGAMDYWGQGTLVTVSSGGGGSGGGGSGGGGSDIQMT |
| | (103/43)-scFc | | QSPSSLSASVGDRVTITCKASQNVDTNVAWYQQKPGQAPKSLIYSAS |
| | | | YVYWDVPSRFSGSASGTDFTLTISSVQSEDFATYYCQQYDQQLITFG |
| | | | CGTKLEIKSGGGGSEVQLVESGGGLVQPGGSLKLSCAASGFTFNKYA |
| | | | MNWVRQAPGKGLEWVARIRSKYNNYATYYADSVKDRFTISRDDSKNT |
| | | | AYLQMNNLKTEDTAVYYCVRHGNFGNSYISYWAYCGQGTLVTVSSGG |
| | | | GGSGGGGSGGGGSQTVVTQEPSLTVSPGGTVTLTCGSSTGAVTSGNY |
| | | | PNWVQQKPGQCPRGLIGGTKFLAPGTPARFSGSLLGGKAALTLSGVQ |
| | | | PEDEAEYYCVLWYSNRWVFGGGTKLTVL |
| 385. | PM76- | bispecific | QVQLVESGGGLVKPGESLRLSCAASGFTFSDYYMYWVRQAPGKCLEW |
| | B10.11 CC x | HLE | VAIISDGGYYTYYSDIIKGRFTISRDNAKNSLYLQMNSLKAEDTAVY |
| | 12C0 CC | molecule | YCARGFPLLRHGAMDYWGQGTLVTVSSGGGGSGGGGSGGGGSDIQMT |
| | (103/43)-scFc | | QSPSSLSASVGDRVTITCKASQNVDTNVAWYQQKPGQAPKSLIYSAS |
| | | | YVYWDVPSRFSGSASGTDFTLTISSVQSEDFATYYCQQYDQQLITFG |
| | | | CGTKLEIKSGGGGSEVQLVESGGGLVQPGGSLKLSCAASGFTFNKYA |
| | | | MNWVRQAPGKGLEWVARIRSKYNNYATYYADSVKDRFTISRDDSKNT |
| | | | AYLQMNNLKTEDTAVYYCVRHGNFGNSYISYWAYCGQGTLVTVSSGG |
| | | | GGSGGGGSGGGGSQTVVTQEPSLTVSPGGTVTLTCGSSTGAVTSGNY |
| | | | PNWVQQKPGQCPRGLIGGTKFLAPGTPARFSGSLLGGKAALTLSGVQ |
| | | | PEDEAEYYCVLWYSNRWVFGGGTKLTVLGGGGDKTHTCPPCPAPELL |
| | | | GGPSVFLFPPKPKDTLMISRTPEVTCVVVDVSHEDPEVKFNWYVDGV |
| | | | EVHNAKTKPCEEQYGSTYRCVSVLTVLHQDWLNGKEYKCKVSNKALP |
| | | | APIEKTISKAKGQPREPQVYTLPPSREEMTKNQVSLTCLVKGFYPSD |
| | | | IAVEWESNGQPENNYKTTPPVLDSDGSFFLYSKLTVDKSRWQQGNVF |
| | | | SCSVMHEALHNHYTQKSLSLSPGKGGGGSGGGGSGGGGSGGGGSGGG |
| | | | GSGGGGSDKTHTCPPCPAPELLGGPSVFLFPPKPKDTLMISRTPEVT |
| | | | CVVVDVSHEDPEVKFNWYVDGVEVHNAKTKPCEEQYGSTYRCVSVLT |
| | | | VLHQDWLNGKEYKCKVSNKALPAPIEKTISKAKGQPREPQVYTLPPS |
| | | | REEMTKNQVSLTCLVKGFYPSDIAVEWESNGQPENNYKTTPPVLDSD |
| | | | GSFFLYSKLTVDKSRWQQGNVFSCSVMHEALHNHYTQKSLSLSPGK |
| 386. | PM 76- | bispecific | QVQLVESGGGLVKPGESLRLSCAASGFTFSDYYMYWVRQAPGKCLEW |
| | B10.11 CC x | HLE | VAIISDGGYYTYYSDIIKGRFTISRDNAKNSLYLQMNSLKAEDTAVY |
| | 12C0 CC | molecule | YCARGFPLLRHGAMDYWGQGTLVTVSSGGGGSGGGGSGGGGSDIQMT |
| | (103/43)- | | QSPSSLSASVGDRVTITCKASQNVDTNVAWYQQKPGQAPKSLIYSAS |
| | scFc_delGK | | YVYWDVPSRFSGSASGTDFTLTISSVQSEDFATYYCQQYDQQLITFG |
| | | | CGTKLEIKSGGGGSEVQLVESGGGLVQPGGSLKLSCAASGFTFNKYA |
| | | | MNWVRQAPGKGLEWVARIRSKYNNYATYYADSVKDRFTISRDDSKNT |
| | | | AYLQMNNLKTEDTAVYYCVRHGNFGNSYISYWAYCGQGTLVTVSSGG |
| | | | GGSGGGGSGGGGSQTVVTQEPSLTVSPGGTVTLTCGSSTGAVTSGNY |
| | | | PNWVQQKPGQCPRGLIGGTKFLAPGTPARFSGSLLGGKAALTLSGVQ |
| | | | PEDEAEYYCVLWYSNRWVFGGGTKLTVLGGGGDKTHTCPPCPAPELL |
| | | | GGPSVFLFPPKPKDTLMISRTPEVTCVVVDVSHEDPEVKFNWYVDGV |
| | | | EVHNAKTKPCEEQYGSTYRCVSVLTVLHQDWLNGKEYKCKVSNKALP |
| | | | APIEKTISKAKGQPREPQVYTLPPSREEMTKNQVSLTCLVKGFYPSD |
| | | | IAVEWESNGQPENNYKTTPPVLDSDGSFFLYSKLTVDKSRWQQGNVF |
| | | | SCSVMHEALHNHYTQKSLSLSPGGGGSGGGGSGGGGSGGGGSGGGGS |
| | | | GGGGSDKTHTCPPCPAPELLGGPSVFLFPPKPKDTLMISRTPEVTCV |
| | | | VVDVSHEDPEVKFNWYVDGVEVHNAKTKPCEEQYGSTYRCVSVLTVL |
| | | | HQDWLNGKEYKCKVSNKALPAPIEKTISKAKGQPREPQVYTLPPSRE |
| | | | EMTKNQVSLTCLVKGFYPSDIAVEWESNGQPENNYKTTPPVLDSDGS |
| | | | FFLYSKLTVDKSRWQQGNVFSCSVMHEALHNHYTQKSLSLSPGK |
| 387. | PM 76- | VH CDR1 | DYYMY |
| | 610.14 x | | |
| | 12C0-scFc | | |
| 388. | PM 76- | VH CDR2 | IISDAGYYTYYSDIIKG |
| | 610.14 x | | |
| | 12C0-scFc | | |
| 389. | PM 76- | VH CDR3 | GFPLLRHGAMDY |
| | 610.14 x | | |
| | 12C0-scFc | | |
| 390. | PM 76- | VL CDR1 | KASQNVDANVA |
| | 610.14 x | | |
| | 12C0-scFc | | |
| 391. | PM 76- | VL CDR2 | SASYRYS |
| | 610.14 x | | |
| | 12C0-scFc | | |
| 392. | PM 76- | VL CDR3 | QQYDQQLIT |
| | 610.14 x | | |
| | 12C0-scFc | | |
| 393. | PM 76- | VH | QVQLVESGGGLVKPGESLRLSCAASGFTFSDYYMYWVRQAPGKGLEW |
| | 610.14 x | | VAIISDAGYYTYYSDIIKGRFTISRDNAKNSLYLQMNSLKAEDTAVY |
| | 12C0-scFc | | YCARGFPLLRHGAMDYWGQGTLVTVSS |
| 394. | PM 76- | VL | DIQMTQSPSSLSASVGDRVTITCKASQNVDANVAWYQQKPGQAPKSL |
| | 610.14 x | | IYSASYRYSDVPSRFSGSASGTDFTLTISSVQSEDFATYYCQQYDQQ |
| | 12C0-scFc | | LITFGGGTKLEIK |
| 395. | PM 76- | scFv | QVQLVESGGGLVKPGESLRLSCAASGFTFSDYYMYWVRQAPGKGLEW |
| | B10.14 x | | VAIISDAGYYTYYSDIIKGRFTISRDNAKNSLYLQMNSLKAEDTAVY |
| | 12C0-scFc | | YCARGFPLLRHGAMDYWGQGTLVTVSSGGGGSGGGGSGGGGSDIQMT |
| | | | QSPSSLSASVGDRVTITCKASQNVDANVAWYQQKPGQAPKSLIYSAS |
| | | | YRYSDVPSRFSGSASGTDFTLTISSVQSEDFATYYCQQYDQQLITFG |
| | | | GGTKLEIK |
| 396. | PM 76- | bispecific | QVQLVESGGGLVKPGESLRLSCAASGFTFSDYYMYWVRQAPGKGLEW |
| | B10.14 x | molecule | VAIISDAGYYTYYSDIIKGRFTISRDNAKNSLYLQMNSLKAEDTAVY |
| | 12C0-scFc | | YCARGFPLLRHGAMDYWGQGTLVTVSSGGGGSGGGGSGGGGSDIQMT |
| | | | QSPSSLSASVGDRVTITCKASQNVDANVAWYQQKPGQAPKSLIYSAS |
| | | | YRYSDVPSRFSGSASGTDFTLTISSVQSEDFATYYCQQYDQQLITFG |
| | | | GGTKLEIKSGGGGSEVQLVESGGGLVQPGGSLKLSCAASGFTFNKYA |
| | | | MNWVRQAPGKGLEWVARIRSKYNNYATYYADSVKDRFTISRDDSKNT |
| | | | AYLQMNNLKTEDTAVYYCVRHGNFGNSYISYWAYWGQGTLVTVSSGG |
| | | | GGSGGGGSGGGGSQTVVTQEPSLTVSPGGTVTLTCGSSTGAVTSGNY |
| | | | PNWVQQKPGQAPRGLIGGTKFLAPGTPARFSGSLLGGKAALTLSGVQ |
| | | | PEDEAEYYCVLWYSNRWVFGGGTKLTVL |
| 397. | PM 76- | bispecific/ | QVQLVESGGGLVKPGESLRLSCAASGFTFSDYYMYWVRQAPGKGLEW |
| | B10.14 x | HLE | VAIISDAGYYTYYSDIIKGRFTISRDNAKNSLYLQMNSLKAEDTAVY |
| | 12C0-scFc | molecule | YCARGFPLLRHGAMDYWGQGTLVTVSSGGGGSGGGGSGGGGSDIQMT |
| | | | QSPSSLSASVGDRVTITCKASQNVDANVAWYQQKPGQAPKSLIYSAS |
| | | | YRYSDVPSRFSGSASGTDFTLTISSVQSEDFATYYCQQYDQQLITFG |
| | | | GGTKLEIKSGGGGSEVQLVESGGGLVQPGGSLKLSCAASGFTFNKYA |
| | | | MNWVRQAPGKGLEWVARIRSKYNNYATYYADSVKDRFTISRDDSKNT |
| | | | AYLQMNNLKTEDTAVYYCVRHGNFGNSYISYWAYWGQGTLVTVSSGG |
| | | | GGSGGGGSGGGGSQTVVTQEPSLTVSPGGTVTLTCGSSTGAVTSGNY |
| | | | PNWVQQKPGQAPRGLIGGTKFLAPGTPARFSGSLLGGKAALTLSGVQ |
| | | | PEDEAEYYCVLWYSNRWVFGGGTKLTVLGGGGDKTHTCPPCPAPELL |
| | | | GGPSVFLFPPKPKDTLMISRTPEVTCVVVDVSHEDPEVKFNWYVDGV |
| | | | EVHNAKTKPCEEQYGSTYRCVSVLTVLHQDWLNGKEYKCKVSNKALP |
| | | | APIEKTISKAKGQPREPQVYTLPPSREEMTKNQVSLTCLVKGFYPSD |
| | | | IAVEWESNGQPENNYKTTPPVLDSDGSFFLYSKLTVDKSRWQQGNVF |
| | | | SCSVMHEALHNHYTQKSLSLSPGKGGGGSGGGGSGGGGSGGGGSGGG |
| | | | GSGGGGSDKTHTCPPCPAPELLGGPSVFLFPPKPKDTLMISRTPEVT |
| | | | CVVVDVSHEDPEVKFNWYVDGVEVHNAKTKPCEEQYGSTYRCVSVLT |
| | | | VLHQDWLNGKEYKCKVSNKALPAPIEKTISKAKGQPREPQVYTLPPS |
| | | | REEMTKNQVSLTCLVKGFYPSDIAVEWESNGQPENNYKTTPPVLDSD |
| | | | GSFFLYSKLTVDKSRWQQGNVFSCSVMHEALHNHYTQKSLSLSPGK |
| 398. | PM 76- | bispecific | QVQLVESGGGLVKPGESLRLSCAASGFTFSDYYMYWVRQAPGKGLEW |
| | B10.14 x | HLE | VAIISDAGYYTYYSDIIKGRFTISRDNAKNSLYLQMNSLKAEDTAVY |
| | 12C0- | molecule | YCARGFPLLRHGAMDYWGQGTLVTVSSGGGGSGGGGSGGGGSDIQMT |
| | scFc_delGK | | QSPSSLSASVGDRVTITCKASQNVDANVAWYQQKPGQAPKSLIYSAS |
| | | | YRYSDVPSRFSGSASGTDFTLTISSVQSEDFATYYCQQYDQQLITFG |
| | | | GGTKLEIKSGGGGSEVQLVESGGGLVQPGGSLKLSCAASGFTFNKYA |
| | | | MNWVRQAPGKGLEWVARIRSKYNNYATYYADSVKDRFTISRDDSKNT |
| | | | AYLQMNNLKTEDTAVYYCVRHGNFGNSYISYWAYWGQGTLVTVSSGG |
| | | | GGSGGGGSGGGGSQTVVTQEPSLTVSPGGTVTLTCGSSTGAVTSGNY |
| | | | PNWVQQKPGQAPRGLIGGTKFLAPGTPARFSGSLLGGKAALTLSGVQ |
| | | | PEDEAEYYCVLWYSNRWVFGGGTKLTVLGGGGDKTHTCPPCPAPELL |
| | | | GGPSVFLFPPKPKDTLMISRTPEVTCVVVDVSHEDPEVKFNWYVDGV |
| | | | EVHNAKTKPCEEQYGSTYRCVSVLTVLHQDWLNGKEYKCKVSNKALP |
| | | | APIEKTISKAKGQPREPQVYTLPPSREEMTKNQVSLTCLVKGFYPSD |
| | | | IAVEWESNGQPENNYKTTPPVLDSDGSFFLYSKLTVDKSRWQQGNVF |
| | | | SCSVMHEALHNHYTQKSLSLSPGGGGSGGGGSGGGGSGGGGSGGGGS |
| | | | GGGGSDKTHTCPPCPAPELLGGPSVFLFPPKPKDTLMISRTPEVTCV |
| | | | VVDVSHEDPEVKFNWYVDGVEVHNAKTKPCEEQYGSTYRCVSVLTVL |
| | | | HQDWLNGKEYKCKVSNKALPAPIEKTISKAKGQPREPQVYTLPPSRE |
| | | | EMTKNQVSLTCLVKGFYPSDIAVEWESNGQPENNYKTTPPVLDSDGS |
| | | | FFLYSKLTVDKSRWQQGNVFSCSVMHEALHNHYTQKSLSLSPGK |
| 399. | PM 76- | bispecific | QVQLVESGGGLVKPGESLRLSCAASGFTFSDYYMYWVRQAPGKGLEW |
| | B10.14 x12C0 | molecule | VAIISDAGYYTYYSDIIKGRFTISRDNAKNSLYLQMNSLKAEDTAVY |
| | CC (103/43)- | | YCARGFPLLRHGAMDYWGQGTLVTVSSGGGGSGGGGSGGGGSDIQMT |
| | scFc | | QSPSSLSASVGDRVTITCKASQNVDANVAWYQQKPGQAPKSLIYSAS |
| | | | YRYSDVPSRFSGSASGTDFTLTISSVQSEDFATYYCQQYDQQLITFG |
| | | | GGTKLEIKSGGGGSEVQLVESGGGLVQPGGSLKLSCAASGFTFNKYA |
| | | | MNWVRQAPGKGLEWVARIRSKYNNYATYYADSVKDRFTISRDDSKNT |
| | | | AYLQMNNLKTEDTAVYYCVRHGNFGNSYISYWAYCGQGTLVTVSSGG |
| | | | GGSGGGGSGGGGSQTVVTQEPSLTVSPGGTVTLTCGSSTGAVTSGNY |
| | | | PNWVQQKPGQCPRGLIGGTKFLAPGTPARFSGSLLGGKAALTLSGVQ |
| | | | PEDEAEYYCVLWYSNRWVFGGGTKLTVL |
| 400. | PM 76- | bispecific | QVQLVESGGGLVKPGESLRLSCAASGFTFSDYYMYWVRQAPGKGLEW |
| | B10.14 x12C0 | HLE | VAIISDAGYYTYYSDIIKGRFTISRDNAKNSLYLQMNSLKAEDTAVY |
| | CC (103/43)- | molecule | YCARGFPLLRHGAMDYWGQGTLVTVSSGGGGSGGGGSGGGGSDIQMT |
| | scFc | | QSPSSLSASVGDRVTITCKASQNVDANVAWYQQKPGQAPKSLIYSAS |
| | | | YRYSDVPSRFSGSASGTDFTLTISSVQSEDFATYYCQQYDQQLITFG |
| | | | GGTKLEIKSGGGGSEVQLVESGGGLVQPGGSLKLSCAASGFTFNKYA |
| | | | MNWVRQAPGKGLEWVARIRSKYNNYATYYADSVKDRFTISRDDSKNT |
| | | | AYLQMNNLKTEDTAVYYCVRHGNFGNSYISYWAYCGQGTLVTVSSGG |
| | | | GGSGGGGSGGGGSQTVVTQEPSLTVSPGGTVTLTCGSSTGAVTSGNY |
| | | | PNWVQQKPGQCPRGLIGGTKFLAPGTPARFSGSLLGGKAALTLSGVQ |
| | | | PEDEAEYYCVLWYSNRWVFGGGTKLTVLGGGGDKTHTCPPCPAPELL |
| | | | GGPSVFLFPPKPKDTLMISRTPEVTCVVVDVSHEDPEVKFNWYVDGV |
| | | | EVHNAKTKPCEEQYGSTYRCVSVLTVLHQDWLNGKEYKCKVSNKALP |
| | | | APIEKTISKAKGQPREPQVYTLPPSREEMTKNQVSLTCLVKGFYPSD |
| | | | IAVEWESNGQPENNYKTTPPVLDSDGSFFLYSKLTVDKSRWQQGNVF |
| | | | SCSVMHEALHNHYTQKSLSLSPGKGGGGSGGGGSGGGGSGGGGSGGG |
| | | | GSGGGGSDKTHTCPPCPAPELLGGPSVFLFPPKPKDTLMISRTPEVT |
| | | | CVVVDVSHEDPEVKFNWYVDGVEVHNAKTKPCEEQYGSTYRCVSVLT |
| | | | VLHQDWLNGKEYKCKVSNKALPAPIEKTISKAKGQPREPQVYTLPPS |
| | | | REEMTKNQVSLTCLVKGFYPSDIAVEWESNGQPENNYKTTPPVLDSD |
| | | | GSFFLYSKLTVDKSRWQQGNVFSCSVMHEALHNHYTQKSLSLSPGK |
| 401. | PM 76- | bispecific | QVQLVESGGGLVKPGESLRLSCAASGFTFSDYYMYWVRQAPGKGLEW |
| | B10.14 x12C0 | HLE | VAIISDAGYYTYYSDIIKGRFTISRDNAKNSLYLQMNSLKAEDTAVY |
| | CC (103/43)- | molecule | YCARGFPLLRHGAMDYWGQGTLVTVSSGGGGSGGGGSGGGGSDIQMT |
| | scFc_delGK | | QSPSSLSASVGDRVTITCKASQNVDANVAWYQQKPGQAPKSLIYSAS |
| | | | YRYSDVPSRFSGSASGTDFTLTISSVQSEDFATYYCQQYDQQLITFG |
| | | | GGTKLEIKSGGGGSEVQLVESGGGLVQPGGSLKLSCAASGFTFNKYA |
| | | | MNWVRQAPGKGLEWVARIRSKYNNYATYYADSVKDRFTISRDDSKNT |
| | | | AYLQMNNLKTEDTAVYYCVRHGNFGNSYISYWAYCGQGTLVTVSSGG |
| | | | GGSGGGGSGGGGSQTVVTQEPSLTVSPGGTVTLTCGSSTGAVTSGNY |
| | | | PNWVQQKPGQCPRGLIGGTKFLAPGTPARFSGSLLGGKAALTLSGVQ |
| | | | PEDEAEYYCVLWYSNRWVFGGGTKLTVLGGGGDKTHTCPPCPAPELL |
| | | | GGPSVFLFPPKPKDTLMISRTPEVTCVVVDVSHEDPEVKFNWYVDGV |
| | | | EVHNAKTKPCEEQYGSTYRCVSVLTVLHQDWLNGKEYKCKVSNKALP |
| | | | APIEKTISKAKGQPREPQVYTLPPSREEMTKNQVSLTCLVKGFYPSD |
| | | | IAVEWESNGQPENNYKTTPPVLDSDGSFFLYSKLTVDKSRWQQGNVF |
| | | | SCSVMHEALHNHYTQKSLSLSPGGGGSGGGGSGGGGSGGGGSGGGGS |
| | | | GGGGSDKTHTCPPCPAPELLGGPSVFLFPPKPKDTLMISRTPEVTCV |
| | | | VVDVSHEDPEVKFNWYVDGVEVHNAKTKPCEEQYGSTYRCVSVLTVL |
| | | | HQDWLNGKEYKCKVSNKALPAPIEKTISKAKGQPREPQVYTLPPSRE |
| | | | EMTKNQVSLTCLVKGFYPSDIAVEWESNGQPENNYKTTPPVLDSDGS |
| | | | FFLYSKLTVDKSRWQQGNVFSCSVMHEALHNHYTQKSLSLSPGK |
| 402. | PM 76- | VH CDR1 | DYYMY |
| | 610.14 CC x | | |
| | 12C0-scFc | | |
| 403. | PM 76- | VH CDR2 | IISDAGYYTYYSDIIKG |
| | 610.14 CC x | | |
| | 12C0-scFc | | |
| 404. | PM 76- | VH CDR3 | GFPLLRHGAMDY |
| | 610.14 CC x | | |
| | 12C0-scFc | | |
| 405. | PM 76- | VL CDR1 | KASQNVDANVA |
| | 610.14 CC x | | |
| | 12C0-scFc | | |
| 406. | PM 76- | VL CDR2 | SASYRYS |
| | 610.14 CC x | | |
| | 12C0-scFc | | |
| 407. | PM 76- | VL CDR3 | QQYDQQLIT |
| | 610.14 CC x | | |
| | 12C0-scFc | | |
| 408. | PM 76- | VH | QVQLVESGGGLVKPGESLRLSCAASGFTFSDYYMYWVRQAPGKCLEW |
| | 610.14 CC x | | VAIISDAGYYTYYSDIIKGRFTISRDNAKNSLYLQMNSLKAEDTAVY |
| | 12C0-scFc | | YCARGFPLLRHGAMDYWGQGTLVTVSS |
| 409. | PM 76- | VL | DIQMTQSPSSLSASVGDRVTITCKASQNVDANVAWYQQKPGQAPKSL |
| | 610.14 CC x | | IYSASYRYSDVPSRFSGSASGTDFTLTISSVQSEDFATYYCQQYDQQ |
| | 12C0-scFc | | LITFGCGTKLEIK |
| 410. | PM 76- | scFv | QVQLVESGGGLVKPGESLRLSCAASGFTFSDYYMYWVRQAPGKCLEW |
| | B10.14 CC x | | VAIISDAGYYTYYSDIIKGRFTISRDNAKNSLYLQMNSLKAEDTAVY |
| | 12C0-scFc | | YCARGFPLLRHGAMDYWGQGTLVTVSSGGGGSGGGGSGGGGSDIQMT |
| | | | QSPSSLSASVGDRVTITCKASQNVDANVAWYQQKPGQAPKSLIYSAS |
| | | | YRYSDVPSRFSGSASGTDFTLTISSVQSEDFATYYCQQYDQQLITFG |
| | | | CGTKLEIK |
| 411. | PM 76- | bispecific | QVQLVESGGGLVKPGESLRLSCAASGFTFSDYYMYWVRQAPGKCLEW |
| | B10.14 CC x | molecule | VAIISDAGYYTYYSDIIKGRFTISRDNAKNSLYLQMNSLKAEDTAVY |
| | 12C0-scFc | | YCARGFPLLRHGAMDYWGQGTLVTVSSGGGGSGGGGSGGGGSDIQMT |
| | | | QSPSSLSASVGDRVTITCKASQNVDANVAWYQQKPGQAPKSLIYSAS |
| | | | YRYSDVPSRFSGSASGTDFTLTISSVQSEDFATYYCQQYDQQLITFG |
| | | | CGTKLEIKSGGGGSEVQLVESGGGLVQPGGSLKLSCAASGFTFNKYA |
| | | | MNWVRQAPGKGLEWVARIRSKYNNYATYYADSVKDRFTISRDDSKNT |
| | | | AYLQMNNLKTEDTAVYYCVRHGNFGNSYISYWAYWGQGTLVTVSSGG |
| | | | GGSGGGGSGGGGSQTVVTQEPSLTVSPGGTVTLTCGSSTGAVTSGNY |
| | | | PNWVQQKPGQAPRGLIGGTKFLAPGTPARFSGSLLGGKAALTLSGVQ |
| | | | PEDEAEYYCVLWYSNRWVFGGGTKLTVL |
| 412. | PM 76- | bispecific | QVQLVESGGGLVKPGESLRLSCAASGFTFSDYYMYWVRQAPGKCLEW |
| | 1310.14 CC x | HLE | VAIISDAGYYTYYSDIIKGRFTISRDNAKNSLYLQMNSLKAEDTAVY |
| | 12C0-scFc | molecule | YCARGFPLLRHGAMDYWGQGTLVTVSSGGGGSGGGGSGGGGSDIQMT |
| | | | QSPSSLSASVGDRVTITCKASQNVDANVAWYQQKPGQAPKSLIYSAS |
| | | | YRYSDVPSRFSGSASGTDFTLTISSVQSEDFATYYCQQYDQQLITFG |
| | | | CGTKLEIKSGGGGSEVQLVESGGGLVQPGGSLKLSCAASGFTFNKYA |
| | | | MNWVRQAPGKGLEWVARIRSKYNNYATYYADSVKDRFTISRDDSKNT |
| | | | AYLQMNNLKTEDTAVYYCVRHGNFGNSYISYWAYWGQGTLVTVSSGG |
| | | | GGSGGGGSGGGGSQTVVTQEPSLTVSPGGTVTLTCGSSTGAVTSGNY |
| | | | PNWVQQKPGQAPRGLIGGTKFLAPGTPARFSGSLLGGKAALTLSGVQ |
| | | | PEDEAEYYCVLWYSNRWVFGGGTKLTVLGGGGDKTHTCPPCPAPELL |
| | | | GGPSVFLFPPKPKDTLMISRTPEVTCVVVDVSHEDPEVKFNWYVDGV |
| | | | EVHNAKTKPCEEQYGSTYRCVSVLTVLHQDWLNGKEYKCKVSNKALP |
| | | | APIEKTISKAKGQPREPQVYTLPPSREEMTKNQVSLTCLVKGFYPSD |
| | | | IAVEWESNGQPENNYKTTPPVLDSDGSFFLYSKLTVDKSRWQQGNVF |
| | | | SCSVMHEALHNHYTQKSLSLSPGKGGGGSGGGGSGGGGSGGGGSGGG |
| | | | GSGGGGSDKTHTCPPCPAPELLGGPSVFLFPPKPKDTLMISRTPEVT |
| | | | CVVVDVSHEDPEVKFNWYVDGVEVHNAKTKPCEEQYGSTYRCVSVLT |
| | | | VLHQDWLNGKEYKCKVSNKALPAPIEKTISKAKGQPREPQVYTLPPS |
| | | | REEMTKNQVSLTCLVKGFYPSDIAVEWESNGQPENNYKTTPPVLDSD |
| | | | GSFFLYSKLTVDKSRWQQGNVFSCSVMHEALHNHYTQKSLSLSPGK |
| 413. | PM 76- | bispecific | QVQLVESGGGLVKPGESLRLSCAASGFTFSDYYMYWVRQAPGKCLEW |
| | 1310.14 CC x | HLE | VAIISDAGYYTYYSDIIKGRFTISRDNAKNSLYLQMNSLKAEDTAVY |
| | 12C0- | molecule | YCARGFPLLRHGAMDYWGQGTLVTVSSGGGGSGGGGSGGGGSDIQMT |
| | scFc_delGK | | QSPSSLSASVGDRVTITCKASQNVDANVAWYQQKPGQAPKSLIYSAS |
| | | | YRYSDVPSRFSGSASGTDFTLTISSVQSEDFATYYCQQYDQQLITFG |
| | | | CGTKLEIKSGGGGSEVQLVESGGGLVQPGGSLKLSCAASGFTFNKYA |
| | | | MNWVRQAPGKGLEWVARIRSKYNNYATYYADSVKDRFTISRDDSKNT |
| | | | AYLQMNNLKTEDTAVYYCVRHGNFGNSYISYWAYWGQGTLVTVSSGG |
| | | | GGSGGGGSGGGGSQTVVTQEPSLTVSPGGTVTLTCGSSTGAVTSGNY |
| | | | PNWVQQKPGQAPRGLIGGTKFLAPGTPARFSGSLLGGKAALTLSGVQ |
| | | | PEDEAEYYCVLWYSNRWVFGGGTKLTVLGGGGDKTHTCPPCPAPELL |
| | | | GGPSVFLFPPKPKDTLMISRTPEVTCVVVDVSHEDPEVKFNWYVDGV |
| | | | EVHNAKTKPCEEQYGSTYRCVSVLTVLHQDWLNGKEYKCKVSNKALP |
| | | | APIEKTISKAKGQPREPQVYTLPPSREEMTKNQVSLTCLVKGFYPSD |
| | | | IAVEWESNGQPENNYKTTPPVLDSDGSFFLYSKLTVDKSRWQQGNVF |
| | | | SCSVMHEALHNHYTQKSLSLSPGGGGSGGGGSGGGGSGGGGSGGGGS |
| | | | GGGGSDKTHTCPPCPAPELLGGPSVFLFPPKPKDTLMISRTPEVTCV |
| | | | VVDVSHEDPEVKFNWYVDGVEVHNAKTKPCEEQYGSTYRCVSVLTVL |
| | | | HQDWLNGKEYKCKVSNKALPAPIEKTISKAKGQPREPQVYTLPPSRE |
| | | | EMTKNQVSLTCLVKGFYPSDIAVEWESNGQPENNYKTTPPVLDSDGS |
| | | | FFLYSKLTVDKSRWQQGNVFSCSVMHEALHNHYTQKSLSLSPGK |
| 414. | PM 76- | bispecific | QVQLVESGGGLVKPGESLRLSCAASGFTFSDYYMYWVRQAPGKCLEW |
| | 1310.14 CC x | molecule | VAIISDAGYYTYYSDIIKGRFTISRDNAKNSLYLQMNSLKAEDTAVY |
| | 12C0 CC | | YCARGFPLLRHGAMDYWGQGTLVTVSSGGGGSGGGGSGGGGSDIQMT |
| | (103/43)-scFc | | QSPSSLSASVGDRVTITCKASQNVDANVAWYQQKPGQAPKSLIYSAS |
| | | | YRYSDVPSRFSGSASGTDFTLTISSVQSEDFATYYCQQYDQQLITFG |
| | | | CGTKLEIKSGGGGSEVQLVESGGGLVQPGGSLKLSCAASGFTFNKYA |
| | | | MNWVRQAPGKGLEWVARIRSKYNNYATYYADSVKDRFTISRDDSKNT |
| | | | AYLQMNNLKTEDTAVYYCVRHGNFGNSYISYWAYCGQGTLVTVSSGG |
| | | | GGSGGGGSGGGGSQTVVTQEPSLTVSPGGTVTLTCGSSTGAVTSGNY |
| | | | PNWVQQKPGQCPRGLIGGTKFLAPGTPARFSGSLLGGKAALTLSGVQ |
| | | | PEDEAEYYCVLWYSNRWVFGGGTKLTVL |
| 415. | PM 76- | bispecific | QVQLVESGGGLVKPGESLRLSCAASGFTFSDYYMYWVRQAPGKCLEW |
| | 1310.14 CC x | HLE | VAIISDAGYYTYYSDIIKGRFTISRDNAKNSLYLQMNSLKAEDTAVY |
| | 12C0 CC | molecule | YCARGFPLLRHGAMDYWGQGTLVTVSSGGGGSGGGGSGGGGSDIQMT |
| | (103/43)-scFc | | QSPSSLSASVGDRVTITCKASQNVDANVAWYQQKPGQAPKSLIYSAS |
| | | | YRYSDVPSRFSGSASGTDFTLTISSVQSEDFATYYCQQYDQQLITFG |
| | | | CGTKLEIKSGGGGSEVQLVESGGGLVQPGGSLKLSCAASGFTFNKYA |
| | | | MNWVRQAPGKGLEWVARIRSKYNNYATYYADSVKDRFTISRDDSKNT |
| | | | AYLQMNNLKTEDTAVYYCVRHGNFGNSYISYWAYCGQGTLVTVSSGG |
| | | | GGSGGGGSGGGGSQTVVTQEPSLTVSPGGTVTLTCGSSTGAVTSGNY |
| | | | PNWVQQKPGQCPRGLIGGTKFLAPGTPARFSGSLLGGKAALTLSGVQ |
| | | | PEDEAEYYCVLWYSNRWVFGGGTKLTVLGGGGDKTHTCPPCPAPELL |
| | | | GGPSVFLFPPKPKDTLMISRTPEVTCVVVDVSHEDPEVKFNWYVDGV |
| | | | EVHNAKTKPCEEQYGSTYRCVSVLTVLHQDWLNGKEYKCKVSNKALP |
| | | | APIEKTISKAKGQPREPQVYTLPPSREEMTKNQVSLTCLVKGFYPSD |
| | | | IAVEWESNGQPENNYKTTPPVLDSDGSFFLYSKLTVDKSRWQQGNVF |
| | | | SCSVMHEALHNHYTQKSLSLSPGKGGGGSGGGGSGGGGSGGGGSGGG |
| | | | GSGGGGSDKTHTCPPCPAPELLGGPSVFLFPPKPKDTLMISRTPEVT |
| | | | CVVVDVSHEDPEVKFNWYVDGVEVHNAKTKPCEEQYGSTYRCVSVLT |
| | | | VLHQDWLNGKEYKCKVSNKALPAPIEKTISKAKGQPREPQVYTLPPS |
| | | | REEMTKNQVSLTCLVKGFYPSDIAVEWESNGQPENNYKTTPPVLDSD |
| | | | GSFFLYSKLTVDKSRWQQGNVFSCSVMHEALHNHYTQKSLSLSPGK |
| 416. | PM 76- | bispecific | QVQLVESGGGLVKPGESLRLSCAASGFTFSDYYMYWVRQAPGKCLEW |
| | B10.14 CC x | HLE | VAIISDAGYYTYYSDIIKGRFTISRDNAKNSLYLQMNSLKAEDTAVY |
| | 12C0 CC | molecule | YCARGFPLLRHGAMDYWGQGTLVTVSSGGGGSGGGGSGGGGSDIQMT |
| | (103/43)- | | QSPSSLSASVGDRVTITCKASQNVDANVAWYQQKPGQAPKSLIYSAS |
| | scFc_delGK | | YRYSDVPSRFSGSASGTDFTLTISSVQSEDFATYYCQQYDQQLITFG |
| | | | CGTKLEIKSGGGGSEVQLVESGGGLVQPGGSLKLSCAASGFTFNKYA |
| | | | MNWVRQAPGKGLEWVARIRSKYNNYATYYADSVKDRFTISRDDSKNT |
| | | | AYLQMNNLKTEDTAVYYCVRHGNFGNSYISYWAYCGQGTLVTVSSGG |
| | | | GGSGGGGSGGGGSQTVVTQEPSLTVSPGGTVTLTCGSSTGAVTSGNY |
| | | | PNWVQQKPGQCPRGLIGGTKFLAPGTPARFSGSLLGGKAALTLSGVQ |
| | | | PEDEAEYYCVLWYSNRWVFGGGTKLTVLGGGGDKTHTCPPCPAPELL |
| | | | GGPSVFLFPPKPKDTLMISRTPEVTCVVVDVSHEDPEVKFNWYVDGV |
| | | | EVHNAKTKPCEEQYGSTYRCVSVLTVLHQDWLNGKEYKCKVSNKALP |
| | | | APIEKTISKAKGQPREPQVYTLPPSREEMTKNQVSLTCLVKGFYPSD |
| | | | IAVEWESNGQPENNYKTTPPVLDSDGSFFLYSKLTVDKSRWQQGNVF |
| | | | SCSVMHEALHNHYTQKSLSLSPGGGGSGGGGSGGGGSGGGGSGGGGS |
| | | | GGGGSDKTHTCPPCPAPELLGGPSVFLFPPKPKDTLMISRTPEVTCV |
| | | | VVDVSHEDPEVKFNWYVDGVEVHNAKTKPCEEQYGSTYRCVSVLTVL |
| | | | HQDWLNGKEYKCKVSNKALPAPIEKTISKAKGQPREPQVYTLPPSRE |
| | | | EMTKNQVSLTCLVKGFYPSDIAVEWESNGQPENNYKTTPPVLDSDGS |
| | | | FFLYSKLTVDKSRWQQGNVFSCSVMHEALHNHYTQKSLSLSPGK |
| 417. | PM 76- | VH CDR1 | DYYMY |
| | 610.17 x | | |
| | 12C0-scFc | | |
| 418. | PM 76- | VH CDR2 | IISDAGYYTYYSDIIKG |
| | 610.17 x | | |
| | 12C0-scFc | | |
| 419. | PM 76- | VH CDR3 | GFPLLRHGAMDY |
| | 610.17 x | | |
| | 12C0-scFc | | |
| 420. | PM 76- | VL CDR1 | KASQNVDANVA |
| | 610.17 x | | |
| | 12C0-scFc | | |
| 421. | PM 76- | VL CDR2 | SASYVYW |
| | 610.17 x | | |
| | 12C0-scFc | | |
| 422. | PM 76- | VL CDR3 | QQYDQQLIT |
| | 610.17 x | | |
| | 12C0-scFc | | |
| 423. | PM 76- | VH | QVQLVESGGGLVKPGESLRLSCAASGFTFSDYYMYWVRQAPGKGLEW |
| | 610.17 x | | VAIISDAGYYTYYSDIIKGRFTISRDNAKNSLYLQMNSLKAEDTAVY |
| | 12C0-scFc | | CARGFPLLRHGAMDYWGQGTLVTVSS |
| 424. | PM 76- | VL | DIQMTQSPSSLSASVGDRVTITCKASQNVDANVAWYQQKPGQAPKSL |
| | 610.17 x | | IYSASYVYWDVPSRFSGSASGTDFTLTISSVQSEDFATYYCQQYDQQ |
| | 12C0-scFc | | LITFGGGTKLEIK |
| 425. | PM 76- | scFv | QVQLVESGGGLVKPGESLRLSCAASGFTFSDYYMYWVRQAPGKGLEW |
| | B10.17 x | | VAIISDAGYYTYYSDIIKGRFTISRDNAKNSLYLQMNSLKAEDTAVY |
| | 12C0-scFc | | YCARGFPLLRHGAMDYWGQGTLVTVSSGGGGSGGGGSGGGGSDIQMT |
| | | | QSPSSLSASVGDRVTITCKASQNVDANVAWYQQKPGQAPKSLIYSAS |
| | | | YVYWDVPSRFSGSASGTDFTLTISSVQSEDFATYYCQQYDQQLITFG |
| | | | GGTKLEIK |
| 426. | PM 76- | bispecific | QVQLVESGGGLVKPGESLRLSCAASGFTFSDYYMYWVRQAPGKGLEW |
| | B10.17 x | molecule | VAIISDAGYYTYYSDIIKGRFTISRDNAKNSLYLQMNSLKAEDTAVY |
| | 12C0-scFc | | YCARGFPLLRHGAMDYWGQGTLVTVSSGGGGSGGGGSGGGGSDIQMT |
| | | | QSPSSLSASVGDRVTITCKASQNVDANVAWYQQKPGQAPKSLIYSAS |
| | | | YVYWDVPSRFSGSASGTDFTLTISSVQSEDFATYYCQQYDQQLITFG |
| | | | GGTKLEIKSGGGGSEVQLVESGGGLVQPGGSLKLSCAASGFTFNKYA |
| | | | MNWVRQAPGKGLEWVARIRSKYNNYATYYADSVKDRFTISRDDSKNT |
| | | | AYLQMNNLKTEDTAVYYCVRHGNFGNSYISYWAYWGQGTLVTVSSGG |
| | | | GGSGGGGSGGGGSQTVVTQEPSLTVSPGGTVTLTCGSSTGAVTSGNY |
| | | | PNWVQQKPGQAPRGLIGGTKFLAPGTPARFSGSLLGGKAALTLSGVQ |
| | | | PEDEAEYYCVLWYSNRWVFGGGTKLTVL |
| 427. | PM 76- | bispecific | QVQLVESGGGLVKPGESLRLSCAASGFTFSDYYMYWVRQAPGKGLEW |
| | B10.17 x | HLE | VAIISDAGYYTYYSDIIKGRFTISRDNAKNSLYLQMNSLKAEDTAVY |
| | 12C0-scFc | molecule | YCARGFPLLRHGAMDYWGQGTLVTVSSGGGGSGGGGSGGGGSDIQMT |
| | | | QSPSSLSASVGDRVTITCKASQNVDANVAWYQQKPGQAPKSLIYSAS |
| | | | YVYWDVPSRFSGSASGTDFTLTISSVQSEDFATYYCQQYDQQLITFG |
| | | | GGTKLEIKSGGGGSEVQLVESGGGLVQPGGSLKLSCAASGFTFNKYA |
| | | | MNWVRQAPGKGLEWVARIRSKYNNYATYYADSVKDRFTISRDDSKNT |
| | | | AYLQMNNLKTEDTAVYYCVRHGNFGNSYISYWAYWGQGTLVTVSSGG |
| | | | GGSGGGGSGGGGSQTVVTQEPSLTVSPGGTVTLTCGSSTGAVTSGNY |
| | | | PNWVQQKPGQAPRGLIGGTKFLAPGTPARFSGSLLGGKAALTLSGVQ |
| | | | PEDEAEYYCVLWYSNRWVFGGGTKLTVLGGGGDKTHTCPPCPAPELL |
| | | | GGPSVFLFPPKPKDTLMISRTPEVTCVVVDVSHEDPEVKFNWYVDGV |
| | | | EVHNAKTKPCEEQYGSTYRCVSVLTVLHQDWLNGKEYKCKVSNKALP |
| | | | APIEKTISKAKGQPREPQVYTLPPSREEMTKNQVSLTCLVKGFYPSD |
| | | | IAVEWESNGQPENNYKTTPPVLDSDGSFFLYSKLTVDKSRWQQGNVF |
| | | | SCSVMHEALHNHYTQKSLSLSPGKGGGGSGGGGSGGGGSGGGGSGGG |
| | | | GSGGGGSDKTHTCPPCPAPELLGGPSVFLFPPKPKDTLMISRTPEVT |
| | | | CVVVDVSHEDPEVKFNWYVDGVEVHNAKTKPCEEQYGSTYRCVSVLT |
| | | | VLHQDWLNGKEYKCKVSNKALPAPIEKTISKAKGQPREPQVYTLPPS |
| | | | REEMTKNQVSLTCLVKGFYPSDIAVEWESNGQPENNYKTTPPVLDSD |
| | | | GSFFLYSKLTVDKSRWQQGNVFSCSVMHEALHNHYTQKSLSLSPGK |
| 428. | PM 76- | bispecific | QVQLVESGGGLVKPGESLRLSCAASGFTFSDYYMYWVRQAPGKGLEW |
| | B10.17 x | HLE | VAIISDAGYYTYYSDIIKGRFTISRDNAKNSLYLQMNSLKAEDTAVY |
| | 12C0- | molecule | YCARGFPLLRHGAMDYWGQGTLVTVSSGGGGSGGGGSGGGGSDIQMT |
| | scFc_delGK | | QSPSSLSASVGDRVTITCKASQNVDANVAWYQQKPGQAPKSLIYSAS |
| | | | YVYWDVPSRFSGSASGTDFTLTISSVQSEDFATYYCQQYDQQLITFG |
| | | | GGTKLEIKSGGGGSEVQLVESGGGLVQPGGSLKLSCAASGFTFNKYA |
| | | | MNWVRQAPGKGLEWVARIRSKYNNYATYYADSVKDRFTISRDDSKNT |
| | | | AYLQMNNLKTEDTAVYYCVRHGNFGNSYISYWAYWGQGTLVTVSSGG |
| | | | GGSGGGGSGGGGSQTVVTQEPSLTVSPGGTVTLTCGSSTGAVTSGNY |
| | | | PNWVQQKPGQAPRGLIGGTKFLAPGTPARFSGSLLGGKAALTLSGVQ |
| | | | PEDEAEYYCVLWYSNRWVFGGGTKLTVLGGGGDKTHTCPPCPAPELL |
| | | | GGPSVFLFPPKPKDTLMISRTPEVTCVVVDVSHEDPEVKFNWYVDGV |
| | | | EVHNAKTKPCEEQYGSTYRCVSVLTVLHQDWLNGKEYKCKVSNKALP |
| | | | APIEKTISKAKGQPREPQVYTLPPSREEMTKNQVSLTCLVKGFYPSD |
| | | | IAVEWESNGQPENNYKTTPPVLDSDGSFFLYSKLTVDKSRWQQGNVF |
| | | | SCSVMHEALHNHYTQKSLSLSPGGGGSGGGGSGGGGSGGGGSGGGGS |
| | | | GGGGSDKTHTCPPCPAPELLGGPSVFLFPPKPKDTLMISRTPEVTCV |
| | | | VVDVSHEDPEVKFNWYVDGVEVHNAKTKPCEEQYGSTYRCVSVLTVL |
| | | | HQDWLNGKEYKCKVSNKALPAPIEKTISKAKGQPREPQVYTLPPSRE |
| | | | EMTKNQVSLTCLVKGFYPSDIAVEWESNGQPENNYKTTPPVLDSDGS |
| | | | FFLYSKLTVDKSRWQQGNVFSCSVMHEALHNHYTQKSLSLSPGK |
| 429. | PM 76- | bispecific | QVQLVESGGGLVKPGESLRLSCAASGFTFSDYYMYWVRQAPGKGLEW |
| | B10.17 x12C0 | molecule | VAIISDAGYYTYYSDIIKGRFTISRDNAKNSLYLQMNSLKAEDTAVY |
| | CC (103/43)- | | YCARGFPLLRHGAMDYWGQGTLVTVSSGGGGSGGGGSGGGGSDIQMT |
| | scFc | | QSPSSLSASVGDRVTITCKASQNVDANVAWYQQKPGQAPKSLIYSAS |
| | | | YVYWDVPSRFSGSASGTDFTLTISSVQSEDFATYYCQQYDQQLITFG |
| | | | GGTKLEIKSGGGGSEVQLVESGGGLVQPGGSLKLSCAASGFTFNKYA |
| | | | MNWVRQAPGKGLEWVARIRSKYNNYATYYADSVKDRFTISRDDSKNT |
| | | | AYLQMNNLKTEDTAVYYCVRHGNFGNSYISYWAYCGQGTLVTVSSGG |
| | | | GGSGGGGSGGGGSQTVVTQEPSLTVSPGGTVTLTCGSSTGAVTSGNY |
| | | | PNWVQQKPGQCPRGLIGGTKFLAPGTPARFSGSLLGGKAALTLSGVQ |
| | | | PEDEAEYYCVLWYSNRWVFGGGTKLTVL |
| 430. | PM 76- | bispecific | QVQLVESGGGLVKPGESLRLSCAASGFTFSDYYMYWVRQAPGKGLEW |
| | B10.17 x12C0 | HLE | VAIISDAGYYTYYSDIIKGRFTISRDNAKNSLYLQMNSLKAEDTAVY |
| | CC (103/43)- | molecule | YCARGFPLLRHGAMDYWGQGTLVTVSSGGGGSGGGGSGGGGSDIQMT |
| | scFc | | QSPSSLSASVGDRVTITCKASQNVDANVAWYQQKPGQAPKSLIYSAS |
| | | | YVYWDVPSRFSGSASGTDFTLTISSVQSEDFATYYCQQYDQQLITFG |
| | | | GGTKLEIKSGGGGSEVQLVESGGGLVQPGGSLKLSCAASGFTFNKYA |
| | | | MNWVRQAPGKGLEWVARIRSKYNNYATYYADSVKDRFTISRDDSKNT |
| | | | AYLQMNNLKTEDTAVYYCVRHGNFGNSYISYWAYCGQGTLVTVSSGG |
| | | | GGSGGGGSGGGGSQTVVTQEPSLTVSPGGTVTLTCGSSTGAVTSGNY |
| | | | PNWVQQKPGQCPRGLIGGTKFLAPGTPARFSGSLLGGKAALTLSGVQ |
| | | | PEDEAEYYCVLWYSNRWVFGGGTKLTVLGGGGDKTHTCPPCPAPELL |
| | | | GGPSVFLFPPKPKDTLMISRTPEVTCVVVDVSHEDPEVKFNWYVDGV |
| | | | EVHNAKTKPCEEQYGSTYRCVSVLTVLHQDWLNGKEYKCKVSNKALP |
| | | | APIEKTISKAKGQPREPQVYTLPPSREEMTKNQVSLTCLVKGFYPSD |
| | | | IAVEWESNGQPENNYKTTPPVLDSDGSFFLYSKLTVDKSRWQQGNVF |
| | | | SCSVMHEALHNHYTQKSLSLSPGKGGGGSGGGGSGGGGSGGGGSGGG |
| | | | GSGGGGSDKTHTCPPCPAPELLGGPSVFLFPPKPKDTLMISRTPEVT |
| | | | CVVVDVSHEDPEVKFNWYVDGVEVHNAKTKPCEEQYGSTYRCVSVLT |
| | | | VLHQDWLNGKEYKCKVSNKALPAPIEKTISKAKGQPREPQVYTLPPS |
| | | | REEMTKNQVSLTCLVKGFYPSDIAVEWESNGQPENNYKTTPPVLDSD |
| | | | GSFFLYSKLTVDKSRWQQGNVFSCSVMHEALHNHYTQKSLSLSPGK |
| 431. | PM 76- | bispecific | QVQLVESGGGLVKPGESLRLSCAASGFTFSDYYMYWVRQAPGKGLEW |
| | B10.17 x12C0 | HLE | VAIISDAGYYTYYSDIIKGRFTISRDNAKNSLYLQMNSLKAEDTAVY |
| | CC (103/43)- | molecule | YCARGFPLLRHGAMDYWGQGTLVTVSSGGGGSGGGGSGGGGSDIQMT |
| | scFc_delGK | | QSPSSLSASVGDRVTITCKASQNVDANVAWYQQKPGQAPKSLIYSAS |
| | | | YVYWDVPSRFSGSASGTDFTLTISSVQSEDFATYYCQQYDQQLITFG |
| | | | GGTKLEIKSGGGGSEVQLVESGGGLVQPGGSLKLSCAASGFTFNKYA |
| | | | MNWVRQAPGKGLEWVARIRSKYNNYATYYADSVKDRFTISRDDSKNT |
| | | | AYLQMNNLKTEDTAVYYCVRHGNFGNSYISYWAYCGQGTLVTVSSGG |
| | | | GGSGGGGSGGGGSQTVVTQEPSLTVSPGGTVTLTCGSSTGAVTSGNY |
| | | | PNWVQQKPGQCPRGLIGGTKFLAPGTPARFSGSLLGGKAALTLSGVQ |
| | | | PEDEAEYYCVLWYSNRWVFGGGTKLTVLGGGGDKTHTCPPCPAPELL |
| | | | GGPSVFLFPPKPKDTLMISRTPEVTCVVVDVSHEDPEVKFNWYVDGV |
| | | | EVHNAKTKPCEEQYGSTYRCVSVLTVLHQDWLNGKEYKCKVSNKALP |
| | | | APIEKTISKAKGQPREPQVYTLPPSREEMTKNQVSLTCLVKGFYPSD |
| | | | IAVEWESNGQPENNYKTTPPVLDSDGSFFLYSKLTVDKSRWQQGNVF |
| | | | SCSVMHEALHNHYTQKSLSLSPGGGGSGGGGSGGGGSGGGGSGGGGS |
| | | | GGGGSDKTHTCPPCPAPELLGGPSVFLFPPKPKDTLMISRTPEVTCV |
| | | | VVDVSHEDPEVKFNWYVDGVEVHNAKTKPCEEQYGSTYRCVSVLTVL |
| | | | HQDWLNGKEYKCKVSNKALPAPIEKTISKAKGQPREPQVYTLPPSRE |
| | | | EMTKNQVSLTCLVKGFYPSDIAVEWESNGQPENNYKTTPPVLDSDGS |
| | | | FFLYSKLTVDKSRWQQGNVFSCSVMHEALHNHYTQKSLSLSPGK |
| 432. | PM 76- | VH CDR1 | DYYMY |
| | 610.17 CC x | | |
| | 12C0-scFc | | |
| 433. | PM 76- | VH CDR2 | IISDAGYYTYYSDIIKG |
| | 610.17 CC x | | |
| | 12C0-scFc | | |
| 434. | PM 76- | VH CDR3 | GFPLLRHGAMDY |
| | 610.17 CC x | | |
| | 12C0-scFc | | |
| 435. | PM 76- | VL CDR1 | KASQNVDANVA |
| | 610.17 CC x | | |
| | 12C0-scFc | | |
| 436. | PM 76- | VL CDR2 | SASYVYW |
| | 610.17 CC x | | |
| | 12C0-scFc | | |
| 437. | PM 76- | VL CDR3 | QQYDQQLIT |
| | 610.17 CC x | | |
| | 12C0-scFc | | |
| 438. | PM 76- | VH | QVQLVESGGGLVKPGESLRLSCAASGFTFSDYYMYWVRQAPGKCLEW |
| | 610.17 CC x | | VAIISDAGYYTYYSDIIKGRFTISRDNAKNSLYLQMNSLKAEDTAVY |
| | 12C0-scFc | | YCARGFPLLRHGAMDYWGQGTLVTVSS |
| 439. | PM 76- | VL | DIQMTQSPSSLSASVGDRVTITCKASQNVDANVAWYQQKPGQAPKSL |
| | 610.17 CC x | | IYSASYVYWDVPSRFSGSASGTDFTLTISSVQSEDFATYYCQQYDQQ |
| | 12C0-scFc | | LITFGCGTKLEIK |
| 440. | PM 76- | scFv | QVQLVESGGGLVKPGESLRLSCAASGFTFSDYYMYWVRQAPGKCLEW |
| | B10.17 CC x | | VAIISDAGYYTYYSDIIKGRFTISRDNAKNSLYLQMNSLKAEDTAVY |
| | 12C0-scFc | | YCARGFPLLRHGAMDYWGQGTLVTVSSGGGGSGGGGSGGGGSDIQMT |
| | | | QSPSSLSASVGDRVTITCKASQNVDANVAWYQQKPGQAPKSLIYSAS |
| | | | YVYWDVPSRFSGSASGTDFTLTISSVQSEDFATYYCQQYDQQLITFG |
| | | | CGTKLEIK |
| 441. | PM 76- | bispecific | QVQLVESGGGLVKPGESLRLSCAASGFTFSDYYMYWVRQAPGKCLEW |
| | B10.17 CC x | molecule | VAIISDAGYYTYYSDIIKGRFTISRDNAKNSLYLQMNSLKAEDTAVY |
| | 12C0-scFc | | YCARGFPLLRHGAMDYWGQGTLVTVSSGGGGSGGGGSGGGGSDIQMT |
| | | | QSPSSLSASVGDRVTITCKASQNVDANVAWYQQKPGQAPKSLIYSAS |
| | | | YVYWDVPSRFSGSASGTDFTLTISSVQSEDFATYYCQQYDQQLITFG |
| | | | CGTKLEIKSGGGGSEVQLVESGGGLVQPGGSLKLSCAASGFTFNKYA |
| | | | MNWVRQAPGKGLEWVARIRSKYNNYATYYADSVKDRFTISRDDSKNT |
| | | | AYLQMNNLKTEDTAVYYCVRHGNFGNSYISYWAYWGQGTLVTVSSGG |
| | | | GGSGGGGSGGGGSQTVVTQEPSLTVSPGGTVTLTCGSSTGAVTSGNY |
| | | | PNWVQQKPGQAPRGLIGGTKFLAPGTPARFSGSLLGGKAALTLSGVQ |
| | | | PEDEAEYYCVLWYSNRWVFGGGTKLTVL |
| 442. | PM 76- | bispecific | QVQLVESGGGLVKPGESLRLSCAASGFTFSDYYMYWVRQAPGKCLEW |
| | B10.17 CC x | HLE | VAIISDAGYYTYYSDIIKGRFTISRDNAKNSLYLQMNSLKAEDTAVY |
| | 12C0-scFc | molecule | YCARGFPLLRHGAMDYWGQGTLVTVSSGGGGSGGGGSGGGGSDIQMT |
| | | | QSPSSLSASVGDRVTITCKASQNVDANVAWYQQKPGQAPKSLIYSAS |
| | | | YVYWDVPSRFSGSASGTDFTLTISSVQSEDFATYYCQQYDQQLITFG |
| | | | CGTKLEIKSGGGGSEVQLVESGGGLVQPGGSLKLSCAASGFTFNKYA |
| | | | MNWVRQAPGKGLEWVARIRSKYNNYATYYADSVKDRFTISRDDSKNT |
| | | | AYLQMNNLKTEDTAVYYCVRHGNFGNSYISYWAYWGQGTLVTVSSGG |
| | | | GGSGGGGSGGGGSQTVVTQEPSLTVSPGGTVTLTCGSSTGAVTSGNY |
| | | | PNWVQQKPGQAPRGLIGGTKFLAPGTPARFSGSLLGGKAALTLSGVQ |
| | | | PEDEAEYYCVLWYSNRWVFGGGTKLTVLGGGGDKTHTCPPCPAPELL |
| | | | GGPSVFLFPPKPKDTLMISRTPEVTCVVVDVSHEDPEVKFNWYVDGV |
| | | | EVHNAKTKPCEEQYGSTYRCVSVLTVLHQDWLNGKEYKCKVSNKALP |
| | | | APIEKTISKAKGQPREPQVYTLPPSREEMTKNQVSLTCLVKGFYPSD |
| | | | IAVEWESNGQPENNYKTTPPVLDSDGSFFLYSKLTVDKSRWQQGNVF |
| | | | SCSVMHEALHNHYTQKSLSLSPGKGGGGSGGGGSGGGGSGGGGSGGG |
| | | | GSGGGGSDKTHTCPPCPAPELLGGPSVFLFPPKPKDTLMISRTPEVT |
| | | | CVVVDVSHEDPEVKFNWYVDGVEVHNAKTKPCEEQYGSTYRCVSVLT |
| | | | VLHQDWLNGKEYKCKVSNKALPAPIEKTISKAKGQPREPQVYTLPPS |
| | | | REEMTKNQVSLTCLVKGFYPSDIAVEWESNGQPENNYKTTPPVLDSD |
| | | | GSFFLYSKLTVDKSRWQQGNVFSCSVMHEALHNHYTQKSLSLSPGK |
| 443. | PM 76- | bispecific | QVQLVESGGGLVKPGESLRLSCAASGFTFSDYYMYWVRQAPGKCLEW |
| | B10.17 CC x | HLE | VAIISDAGYYTYYSDIIKGRFTISRDNAKNSLYLQMNSLKAEDTAVY |
| | 12C0- | molecule | YCARGFPLLRHGAMDYWGQGTLVTVSSGGGGSGGGGSGGGGSDIQMT |
| | scFc_delGK | | QSPSSLSASVGDRVTITCKASQNVDANVAWYQQKPGQAPKSLIYSAS |
| | | | YVYWDVPSRFSGSASGTDFTLTISSVQSEDFATYYCQQYDQQLITFG |
| | | | CGTKLEIKSGGGGSEVQLVESGGGLVQPGGSLKLSCAASGFTFNKYA |
| | | | MNWVRQAPGKGLEWVARIRSKYNNYATYYADSVKDRFTISRDDSKNT |
| | | | AYLQMNNLKTEDTAVYYCVRHGNFGNSYISYWAYWGQGTLVTVSSGG |
| | | | GGSGGGGSGGGGSQTVVTQEPSLTVSPGGTVTLTCGSSTGAVTSGNY |
| | | | PNWVQQKPGQAPRGLIGGTKFLAPGTPARFSGSLLGGKAALTLSGVQ |
| | | | PEDEAEYYCVLWYSNRWVFGGGTKLTVLGGGGDKTHTCPPCPAPELL |
| | | | GGPSVFLFPPKPKDTLMISRTPEVTCVVVDVSHEDPEVKFNWYVDGV |
| | | | EVHNAKTKPCEEQYGSTYRCVSVLTVLHQDWLNGKEYKCKVSNKALP |
| | | | APIEKTISKAKGQPREPQVYTLPPSREEMTKNQVSLTCLVKGFYPSD |
| | | | IAVEWESNGQPENNYKTTPPVLDSDGSFFLYSKLTVDKSRWQQGNVF |
| | | | SCSVMHEALHNHYTQKSLSLSPGGGGSGGGGSGGGGSGGGGSGGGGS |
| | | | GGGGSDKTHTCPPCPAPELLGGPSVFLFPPKPKDTLMISRTPEVTCV |
| | | | VVDVSHEDPEVKFNWYVDGVEVHNAKTKPCEEQYGSTYRCVSVLTVL |
| | | | HQDWLNGKEYKCKVSNKALPAPIEKTISKAKGQPREPQVYTLPPSRE |
| | | | EMTKNQVSLTCLVKGFYPSDIAVEWESNGQPENNYKTTPPVLDSDGS |
| | | | FFLYSKLTVDKSRWQQGNVFSCSVMHEALHNHYTQKSLSLSPGK |
| 444. | PM 76- | bispecific | QVQLVESGGGLVKPGESLRLSCAASGFTFSDYYMYWVRQAPGKCLEW |
| | 1310.17 CC x | molecule | VAIISDAGYYTYYSDIIKGRFTISRDNAKNSLYLQMNSLKAEDTAVY |
| | 12C0 CC | | YCARGFPLLRHGAMDYWGQGTLVTVSSGGGGSGGGGSGGGGSDIQMT |
| | (103/43)-scFc | | QSPSSLSASVGDRVTITCKASQNVDANVAWYQQKPGQAPKSLIYSAS |
| | | | YVYWDVPSRFSGSASGTDFTLTISSVQSEDFATYYCQQYDQQLITFG |
| | | | CGTKLEIKSGGGGSEVQLVESGGGLVQPGGSLKLSCAASGFTFNKYA |
| | | | MNWVRQAPGKGLEWVARIRSKYNNYATYYADSVKDRFTISRDDSKNT |
| | | | AYLQMNNLKTEDTAVYYCVRHGNFGNSYISYWAYCGQGTLVTVSSGG |
| | | | GGSGGGGSGGGGSQTVVTQEPSLTVSPGGTVTLTCGSSTGAVTSGNY |
| | | | PNWVQQKPGQCPRGLIGGTKFLAPGTPARFSGSLLGGKAALTLSGVQ |
| | | | PEDEAEYYCVLWYSNRWVFGGGTKLTVL |
| 445. | PM 76- | bispecific | QVQLVESGGGLVKPGESLRLSCAASGFTFSDYYMYWVRQAPGKCLEW |
| | 1310.17 CC x | HLE | VAIISDAGYYTYYSDIIKGRFTISRDNAKNSLYLQMNSLKAEDTAVY |
| | 12C0 CC | molecule | YCARGFPLLRHGAMDYWGQGTLVTVSSGGGGSGGGGSGGGGSDIQMT |
| | (103/43)-scFc | | QSPSSLSASVGDRVTITCKASQNVDANVAWYQQKPGQAPKSLIYSAS |
| | | | YVYWDVPSRFSGSASGTDFTLTISSVQSEDFATYYCQQYDQQLITFG |
| | | | CGTKLEIKSGGGGSEVQLVESGGGLVQPGGSLKLSCAASGFTFNKYA |
| | | | MNWVRQAPGKGLEWVARIRSKYNNYATYYADSVKDRFTISRDDSKNT |
| | | | AYLQMNNLKTEDTAVYYCVRHGNFGNSYISYWAYCGQGTLVTVSSGG |
| | | | GGSGGGGSGGGGSQTVVTQEPSLTVSPGGTVTLTCGSSTGAVTSGNY |
| | | | PNWVQQKPGQCPRGLIGGTKFLAPGTPARFSGSLLGGKAALTLSGVQ |
| | | | PEDEAEYYCVLWYSNRWVFGGGTKLTVLGGGGDKTHTCPPCPAPELL |
| | | | GGPSVFLFPPKPKDTLMISRTPEVTCVVVDVSHEDPEVKFNWYVDGV |
| | | | EVHNAKTKPCEEQYGSTYRCVSVLTVLHQDWLNGKEYKCKVSNKALP |
| | | | APIEKTISKAKGQPREPQVYTLPPSREEMTKNQVSLTCLVKGFYPSD |
| | | | IAVEWESNGQPENNYKTTPPVLDSDGSFFLYSKLTVDKSRWQQGNVF |
| | | | SCSVMHEALHNHYTQKSLSLSPGKGGGGSGGGGSGGGGSGGGGSGGG |
| | | | GSGGGGSDKTHTCPPCPAPELLGGPSVFLFPPKPKDTLMISRTPEVT |
| | | | CVVVDVSHEDPEVKFNWYVDGVEVHNAKTKPCEEQYGSTYRCVSVLT |
| | | | VLHQDWLNGKEYKCKVSNKALPAPIEKTISKAKGQPREPQVYTLPPS |
| | | | REEMTKNQVSLTCLVKGFYPSDIAVEWESNGQPENNYKTTPPVLDSD |
| | | | GSFFLYSKLTVDKSRWQQGNVFSCSVMHEALHNHYTQKSLSLSPGK |
| 446. | PM 76- | bispecific | QVQLVESGGGLVKPGESLRLSCAASGFTFSDYYMYWVRQAPGKCLEW |
| | 1310.17 CC x | HLE | VAIISDAGYYTYYSDIIKGRFTISRDNAKNSLYLQMNSLKAEDTAVY |
| | 12C0 CC | molecule | YCARGFPLLRHGAMDYWGQGTLVTVSSGGGGSGGGGSGGGGSDIQMT |
| | (103/43)- | | QSPSSLSASVGDRVTITCKASQNVDANVAWYQQKPGQAPKSLIYSAS |
| | scFc_delGK | | YVYWDVPSRFSGSASGTDFTLTISSVQSEDFATYYCQQYDQQLITFG |
| | | | CGTKLEIKSGGGGSEVQLVESGGGLVQPGGSLKLSCAASGFTFNKYA |
| | | | MNWVRQAPGKGLEWVARIRSKYNNYATYYADSVKDRFTISRDDSKNT |
| | | | AYLQMNNLKTEDTAVYYCVRHGNFGNSYISYWAYCGQGTLVTVSSGG |
| | | | GGSGGGGSGGGGSQTVVTQEPSLTVSPGGTVTLTCGSSTGAVTSGNY |
| | | | PNWVQQKPGQCPRGLIGGTKFLAPGTPARFSGSLLGGKAALTLSGVQ |
| | | | PEDEAEYYCVLWYSNRWVFGGGTKLTVLGGGGDKTHTCPPCPAPELL |
| | | | GGPSVFLFPPKPKDTLMISRTPEVTCVVVDVSHEDPEVKFNWYVDGV |
| | | | EVHNAKTKPCEEQYGSTYRCVSVLTVLHQDWLNGKEYKCKVSNKALP |
| | | | APIEKTISKAKGQPREPQVYTLPPSREEMTKNQVSLTCLVKGFYPSD |
| | | | IAVEWESNGQPENNYKTTPPVLDSDGSFFLYSKLTVDKSRWQQGNVF |
| | | | SCSVMHEALHNHYTQKSLSLSPGGGGSGGGGSGGGGSGGGGSGGGGS |
| | | | GGGGSDKTHTCPPCPAPELLGGPSVFLFPPKPKDTLMISRTPEVTCV |
| | | | VVDVSHEDPEVKFNWYVDGVEVHNAKTKPCEEQYGSTYRCVSVLTVL |
| | | | HQDWLNGKEYKCKVSNKALPAPIEKTISKAKGQPREPQVYTLPPSRE |
| | | | EMTKNQVSLTCLVKGFYPSDIAVEWESNGQPENNYKTTPPVLDSDGS |
| | | | FFLYSKLTVDKSRWQQGNVFSCSVMHEALHNHYTQKSLSLSPGK |
| 447. | PM 76-1310 x | VH CDR1 | DYYMY |
| | 12C0-scFc | | |
| 448. | PM 76-610 x | VH CDR2 | IISDGGYYTYYSDIIKG |
| | 12C0-scFc | | |
| 449. | PM 76-1310 x | VH CDR3 | GFPLLRHGAMDY |
| | 12C0-scFc | | |
| 450. | PM 76-610 x | VL CDR1 | KASQNVDTNVA |
| | 12C0-scFc | | |
| 451. | PM 76-1310 x | VL CDR2 | SASYRYS |
| | 12C0-scFc | | |
| 452. | PM 76-1310 x | V L CDR3 | QQYDSYPYT |
| | 12C0-scFc | | |
| 453. | PM 76-1310 x | VH | QVQLVESGGGLVKPGESLRLSCAASGFTFSDYYMYWVRQAPGKGLEW |
| | 12C0-scFc | | VAIISDGGYYTYYSDIIKGRFTISRDNAKNSLYLQMNSLKAEDTAVY |
| | | | YCARGFPLLRHGAMDYWGQGTLVTVSS |
| 454. | PM 76-1310 x | VL | DIQMTQSPSSLSASVGDRVTITCKASQNVDTNVAWYQQKPGQAPKSL |
| | 12C0-scFc | | IYSASYRYSDVPSRFSGSASGTDFTLTISSVQSEDFATYYCQQYDSY |
| | | | PYTFGGGTKLEIK |
| 455. | PM 76-1310 x | scFv | QVQLVESGGGLVKPGESLRLSCAASGFTFSDYYMYWVRQAPGKGLEW |
| | 12C0-scFc | | VAIISDGGYYTYYSDIIKGRFTISRDNAKNSLYLQMNSLKAEDTAVY |
| | | | YCARGFPLLRHGAMDYWGQGTLVTVSSGGGGSGGGGSGGGGSDIQMT |
| | | | QSPSSLSASVGDRVTITCKASQNVDTNVAWYQQKPGQAPKSLIYSAS |
| | | | YRYSDVPSRFSGSASGTDFTLTISSVQSEDFATYYCQQYDSYPYTFG |
| | | | GGTKLEIK |
| 456. | PM 76-1310 x | bispecific | QVQLVESGGGLVKPGESLRLSCAASGFTFSDYYMYWVRQAPGKGLEW |
| | 12C0-scFc | molecule | VAIISDGGYYTYYSDIIKGRFTISRDNAKNSLYLQMNSLKAEDTAVY |
| | | | YCARGFPLLRHGAMDYWGQGTLVTVSSGGGGSGGGGSGGGGSDIQMT |
| | | | QSPSSLSASVGDRVTITCKASQNVDTNVAWYQQKPGQAPKSLIYSAS |
| | | | YRYSDVPSRFSGSASGTDFTLTISSVQSEDFATYYCQQYDSYPYTFG |
| | | | GGTKLEIKSGGGGSEVQLVESGGGLVQPGGSLKLSCAASGFTFNKYA |
| | | | MNWVRQAPGKGLEWVARIRSKYNNYATYYADSVKDRFTISRDDSKNT |
| | | | AYLQMNNLKTEDTAVYYCVRHGNFGNSYISYWAYWGQGTLVTVSSGG |
| | | | GGSGGGGSGGGGSQTVVTQEPSLTVSPGGTVTLTCGSSTGAVTSGNY |
| | | | PNWVQQKPGQAPRGLIGGTKFLAPGTPARFSGSLLGGKAALTLSGVQ |
| | | | PEDEAEYYCVLWYSNRWVFGGGTKLTVL |
| 457. | PM 76-1310 x | bispecific | QVQLVESGGGLVKPGESLRLSCAASGFTFSDYYMYWVRQAPGKGLEW |
| | 12C0-scFc | HLE | VAIISDGGYYTYYSDIIKGRFTISRDNAKNSLYLQMNSLKAEDTAVY |
| | | molecule | YCARGFPLLRHGAMDYWGQGTLVTVSSGGGGSGGGGSGGGGSDIQMT |
| | | | QSPSSLSASVGDRVTITCKASQNVDTNVAWYQQKPGQAPKSLIYSAS |
| | | | YRYSDVPSRFSGSASGTDFTLTISSVQSEDFATYYCQQYDSYPYTFG |
| | | | GGTKLEIKSGGGGSEVQLVESGGGLVQPGGSLKLSCAASGFTFNKYA |
| | | | MNWVRQAPGKGLEWVARIRSKYNNYATYYADSVKDRFTISRDDSKNT |
| | | | AYLQMNNLKTEDTAVYYCVRHGNFGNSYISYWAYWGQGTLVTVSSGG |
| | | | GGSGGGGSGGGGSQTVVTQEPSLTVSPGGTVTLTCGSSTGAVTSGNY |
| | | | PNWVQQKPGQAPRGLIGGTKFLAPGTPARFSGSLLGGKAALTLSGVQ |
| | | | PEDEAEYYCVLWYSNRWVFGGGTKLTVLGGGGDKTHTCPPCPAPELL |
| | | | GGPSVFLFPPKPKDTLMISRTPEVTCVVVDVSHEDPEVKFNWYVDGV |
| | | | EVHNAKTKPCEEQYGSTYRCVSVLTVLHQDWLNGKEYKCKVSNKALP |
| | | | APIEKTISKAKGQPREPQVYTLPPSREEMTKNQVSLTCLVKGFYPSD |
| | | | IAVEWESNGQPENNYKTTPPVLDSDGSFFLYSKLTVDKSRWQQGNVF |
| | | | SCSVMHEALHNHYTQKSLSLSPGKGGGGSGGGGSGGGGSGGGGSGGG |
| | | | GSGGGGSDKTHTCPPCPAPELLGGPSVFLFPPKPKDTLMISRTPEVT |
| | | | CVVVDVSHEDPEVKFNWYVDGVEVHNAKTKPCEEQYGSTYRCVSVLT |
| | | | VLHQDWLNGKEYKCKVSNKALPAPIEKTISKAKGQPREPQVYTLPPS |
| | | | REEMTKNQVSLTCLVKGFYPSDIAVEWESNGQPENNYKTTPPVLDSD |
| | | | GSFFLYSKLTVDKSRWQQGNVFSCSVMHEALHNHYTQKSLSLSPGK |
| 458. | PM 76-1310 x | bispecific | QVQLVESGGGLVKPGESLRLSCAASGFTFSDYYMYWVRQAPGKGLEW |
| | 12C0- | HLE | VAIISDGGYYTYYSDIIKGRFTISRDNAKNSLYLQMNSLKAEDTAVY |
| | scFc_delGK | molecule | YCARGFPLLRHGAMDYWGQGTLVTVSSGGGGSGGGGSGGGGSDIQMT |
| | | | QSPSSLSASVGDRVTITCKASQNVDTNVAWYQQKPGQAPKSLIYSAS |
| | | | YRYSDVPSRFSGSASGTDFTLTISSVQSEDFATYYCQQYDSYPYTFG |
| | | | GGTKLEIKSGGGGSEVQLVESGGGLVQPGGSLKLSCAASGFTFNKYA |
| | | | MNWVRQAPGKGLEWVARIRSKYNNYATYYADSVKDRFTISRDDSKNT |
| | | | AYLQMNNLKTEDTAVYYCVRHGNFGNSYISYWAYWGQGTLVTVSSGG |
| | | | GGSGGGGSGGGGSQTVVTQEPSLTVSPGGTVTLTCGSSTGAVTSGNY |
| | | | PNWVQQKPGQAPRGLIGGTKFLAPGTPARFSGSLLGGKAALTLSGVQ |
| | | | PEDEAEYYCVLWYSNRWVFGGGTKLTVLGGGGDKTHTCPPCPAPELL |
| | | | GGPSVFLFPPKPKDTLMISRTPEVTCVVVDVSHEDPEVKFNWYVDGV |
| | | | EVHNAKTKPCEEQYGSTYRCVSVLTVLHQDWLNGKEYKCKVSNKALP |
| | | | APIEKTISKAKGQPREPQVYTLPPSREEMTKNQVSLTCLVKGFYPSD |
| | | | IAVEWESNGQPENNYKTTPPVLDSDGSFFLYSKLTVDKSRWQQGNVF |
| | | | SCSVMHEALHNHYTQKSLSLSPGGGGSGGGGSGGGGSGGGGSGGGGS |
| | | | GGGGSDKTHTCPPCPAPELLGGPSVFLFPPKPKDTLMISRTPEVTCV |
| | | | VVDVSHEDPEVKFNWYVDGVEVHNAKTKPCEEQYGSTYRCVSVLTVL |
| | | | HQDWLNGKEYKCKVSNKALPAPIEKTISKAKGQPREPQVYTLPPSRE |
| | | | EMTKNQVSLTCLVKGFYPSDIAVEWESNGQPENNYKTTPPVLDSDGS |
| | | | FFLYSKLTVDKSRWQQGNVFSCSVMHEALHNHYTQKSLSLSPGK |
| 459. | PM 76-1310 x | bispecific | QVQLVESGGGLVKPGESLRLSCAASGFTFSDYYMYWVRQAPGKGLEW |
| | 12C0 CC | molecule | VAIISDGGYYTYYSDIIKGRFTISRDNAKNSLYLQMNSLKAEDTAVY |
| | (103/43)-scFc | | YCARGFPLLRHGAMDYWGQGTLVTVSSGGGGSGGGGSGGGGSDIQMT |
| | | | QSPSSLSASVGDRVTITCKASQNVDTNVAWYQQKPGQAPKSLIYSAS |
| | | | YRYSDVPSRFSGSASGTDFTLTISSVQSEDFATYYCQQYDSYPYTFG |
| | | | GGTKLEIKSGGGGSEVQLVESGGGLVQPGGSLKLSCAASGFTFNKYA |
| | | | MNWVRQAPGKGLEWVARIRSKYNNYATYYADSVKDRFTISRDDSKNT |
| | | | AYLQMNNLKTEDTAVYYCVRHGNFGNSYISYWAYCGQGTLVTVSSGG |
| | | | GGSGGGGSGGGGSQTVVTQEPSLTVSPGGTVTLTCGSSTGAVTSGNY |
| | | | PNWVQQKPGQCPRGLIGGTKFLAPGTPARFSGSLLGGKAALTLSGVQ |
| | | | PEDEAEYYCVLWYSNRWVFGGGTKLTVL |
| 460. | PM 76-1310 x | bispecific | QVQLVESGGGLVKPGESLRLSCAASGFTFSDYYMYWVRQAPGKGLEW |
| | 12C0 CC | HLE | VAIISDGGYYTYYSDIIKGRFTISRDNAKNSLYLQMNSLKAEDTAVY |
| | (103/43)-scFc | molecule | YCARGFPLLRHGAMDYWGQGTLVTVSSGGGGSGGGGSGGGGSDIQMT |
| | | | QSPSSLSASVGDRVTITCKASQNVDTNVAWYQQKPGQAPKSLIYSAS |
| | | | YRYSDVPSRFSGSASGTDFTLTISSVQSEDFATYYCQQYDSYPYTFG |
| | | | GGTKLEIKSGGGGSEVQLVESGGGLVQPGGSLKLSCAASGFTFNKYA |
| | | | MNWVRQAPGKGLEWVARIRSKYNNYATYYADSVKDRFTISRDDSKNT |
| | | | AYLQMNNLKTEDTAVYYCVRHGNFGNSYISYWAYCGQGTLVTVSSGG |
| | | | GGSGGGGSGGGGSQTVVTQEPSLTVSPGGTVTLTCGSSTGAVTSGNY |
| | | | PNWVQQKPGQCPRGLIGGTKFLAPGTPARFSGSLLGGKAALTLSGVQ |
| | | | PEDEAEYYCVLWYSNRWVFGGGTKLTVLGGGGDKTHTCPPCPAPELL |
| | | | GGPSVFLFPPKPKDTLMISRTPEVTCVVVDVSHEDPEVKFNWYVDGV |
| | | | EVHNAKTKPCEEQYGSTYRCVSVLTVLHQDWLNGKEYKCKVSNKALP |
| | | | APIEKTISKAKGQPREPQVYTLPPSREEMTKNQVSLTCLVKGFYPSD |
| | | | IAVEWESNGQPENNYKTTPPVLDSDGSFFLYSKLTVDKSRWQQGNVF |
| | | | SCSVMHEALHNHYTQKSLSLSPGKGGGGSGGGGSGGGGSGGGGSGGG |
| | | | GSGGGGSDKTHTCPPCPAPELLGGPSVFLFPPKPKDTLMISRTPEVT |
| | | | CVVVDVSHEDPEVKFNWYVDGVEVHNAKTKPCEEQYGSTYRCVSVLT |
| | | | VLHQDWLNGKEYKCKVSNKALPAPIEKTISKAKGQPREPQVYTLPPS |
| | | | REEMTKNQVSLTCLVKGFYPSDIAVEWESNGQPENNYKTTPPVLDSD |
| | | | GSFFLYSKLTVDKSRWQQGNVFSCSVMHEALHNHYTQKSLSLSPGK |
| 461. | PM 76-1310 x | bispecific | QVQLVESGGGLVKPGESLRLSCAASGFTFSDYYMYWVRQAPGKGLEW |
| | 12C0 CC | HLE | VAIISDGGYYTYYSDIIKGRFTISRDNAKNSLYLQMNSLKAEDTAVY |
| | (103/43)- | molecule | YCARGFPLLRHGAMDYWGQGTLVTVSSGGGGSGGGGSGGGGSDIQMT |
| | scFc_delGK | | QSPSSLSASVGDRVTITCKASQNVDTNVAWYQQKPGQAPKSLIYSAS |
| | | | YRYSDVPSRFSGSASGTDFTLTISSVQSEDFATYYCQQYDSYPYTFG |
| | | | GGTKLEIKSGGGGSEVQLVESGGGLVQPGGSLKLSCAASGFTFNKYA |
| | | | MNWVRQAPGKGLEWVARIRSKYNNYATYYADSVKDRFTISRDDSKNT |
| | | | AYLQMNNLKTEDTAVYYCVRHGNFGNSYISYWAYCGQGTLVTVSSGG |
| | | | GGSGGGGSGGGGSQTVVTQEPSLTVSPGGTVTLTCGSSTGAVTSGNY |
| | | | PNWVQQKPGQCPRGLIGGTKFLAPGTPARFSGSLLGGKAALTLSGVQ |
| | | | PEDEAEYYCVLWYSNRWVFGGGTKLTVLGGGGDKTHTCPPCPAPELL |
| | | | GGPSVFLFPPKPKDTLMISRTPEVTCVVVDVSHEDPEVKFNWYVDGV |
| | | | EVHNAKTKPCEEQYGSTYRCVSVLTVLHQDWLNGKEYKCKVSNKALP |
| | | | APIEKTISKAKGQPREPQVYTLPPSREEMTKNQVSLTCLVKGFYPSD |
| | | | IAVEWESNGQPENNYKTTPPVLDSDGSFFLYSKLTVDKSRWQQGNVF |
| | | | SCSVMHEALHNHYTQKSLSLSPGGGGSGGGGSGGGGSGGGGSGGGGS |
| | | | GGGGSDKTHTCPPCPAPELLGGPSVFLFPPKPKDTLMISRTPEVTCV |
| | | | VVDVSHEDPEVKFNWYVDGVEVHNAKTKPCEEQYGSTYRCVSVLTVL |
| | | | HQDWLNGKEYKCKVSNKALPAPIEKTISKAKGQPREPQVYTLPPSRE |
| | | | EMTKNQVSLTCLVKGFYPSDIAVEWESNGQPENNYKTTPPVLDSDGS |
| | | | FFLYSKLTVDKSRWQQGNVFSCSVMHEALHNHYTQKSLSLSPGK |
| 462. | PM 76-1310 | VH CDR1 | DYYMY |
| | CC x 12C0- | | |
| | scFc | | |
| 463. | PM 76-1310 | VH CDR2 | IISDGGYYTYYSDIIKG |
| | CC x 12C0- | | |
| | scFc | | |
| 464. | PM 76-1310 | VH CDR3 | GFPLLRHGAMDY |
| | CC x 12C0- | | |
| | scFc | | |
| 465. | PM 76-1310 | VL CDR1 | KASQNVDTNVA |
| | CC x 12C0- | | |
| | scFc | | |
| 466. | PM 76-1310 | VL CDR2 | SASYRYS |
| | CC x 12C0- | | |
| | scFc | | |
| 467. | PM 76-1310 | VL CDR3 | QQYDSYPYT |
| | CC x 12C0- | | |
| | scFc | | |
| 468. | PM 76-1310 | VH | QVQLVESGGGLVKPGESLRLSCAASGFTFSDYYMYWVRQAPGKCLEW |
| | CC x 12C0- | | VAIISDGGYYTYYSDIIKGRFTISRDNAKNSLYLQMNSLKAEDTAVY |
| | ScFc | | YCARGFPLLRHGAMDYWGQGTLVTVSS |
| 469. | PM 76-1310 | VL | DIQMTQSPSSLSASVGDRVTITCKASQNVDTNVAWYQQKPGQAPKSL |
| | CC x 12C0- | | IYSASYRYSDVPSRFSGSASGTDFTLTISSVQSEDFATYYCQQYDSY |
| | ScFc | | PYTFGCGTKLEIK |
| 470. | PM 76-1310 | scFv | QVQLVESGGGLVKPGESLRLSCAASGFTFSDYYMYWVRQAPGKCLEW |
| | CC x 12C0- | | VAIISDGGYYTYYSDIIKGRFTISRDNAKNSLYLQMNSLKAEDTAVY |
| | scFc | | YCARGFPLLRHGAMDYWGQGTLVTVSSGGGGSGGGGSGGGGSDIQMT |
| | | | QSPSSLSASVGDRVTITCKASQNVDTNVAWYQQKPGQAPKSLIYSAS |
| | | | YRYSDVPSRFSGSASGTDFTLTISSVQSEDFATYYCQQYDSYPYTFG |
| | | | CGTKLEIK |
| 471. | PM 76-1310 | bispecific | QVQLVESGGGLVKPGESLRLSCAASGFTFSDYYMYWVRQAPGKCLEW |
| | CC x 12C0- | molecule | VAIISDGGYYTYYSDIIKGRFTISRDNAKNSLYLQMNSLKAEDTAVY |
| | scFc | | YCARGFPLLRHGAMDYWGQGTLVTVSSGGGGSGGGGSGGGGSDIQMT |
| | | | QSPSSLSASVGDRVTITCKASQNVDTNVAWYQQKPGQAPKSLIYSAS |
| | | | YRYSDVPSRFSGSASGTDFTLTISSVQSEDFATYYCQQYDSYPYTFG |
| | | | CGTKLEIKSGGGGSEVQLVESGGGLVQPGGSLKLSCAASGFTFNKYA |
| | | | MNWVRQAPGKGLEWVARIRSKYNNYATYYADSVKDRFTISRDDSKNT |
| | | | AYLQMNNLKTEDTAVYYCVRHGNFGNSYISYWAYWGQGTLVTVSSGG |
| | | | GGSGGGGSGGGGSQTVVTQEPSLTVSPGGTVTLTCGSSTGAVTSGNY |
| | | | PNWVQQKPGQAPRGLIGGTKFLAPGTPARFSGSLLGGKAALTLSGVQ |
| | | | PEDEAEYYCVLWYSNRWVFGGGTKLTVL |
| 472. | PM 76-1310 | bispecific | QVQLVESGGGLVKPGESLRLSCAASGFTFSDYYMYWVRQAPGKCLEW |
| | CC x12C0- | HLE | VAIISDGGYYTYYSDIIKGRFTISRDNAKNSLYLQMNSLKAEDTAVY |
| | scFc | molecule | YCARGFPLLRHGAMDYWGQGTLVTVSSGGGGSGGGGSGGGGSDIQMT |
| | | | QSPSSLSASVGDRVTITCKASQNVDTNVAWYQQKPGQAPKSLIYSAS |
| | | | YRYSDVPSRFSGSASGTDFTLTISSVQSEDFATYYCQQYDSYPYTFG |
| | | | CGTKLEIKSGGGGSEVQLVESGGGLVQPGGSLKLSCAASGFTFNKYA |
| | | | MNWVRQAPGKGLEWVARIRSKYNNYATYYADSVKDRFTISRDDSKNT |
| | | | AYLQMNNLKTEDTAVYYCVRHGNFGNSYISYWAYWGQGTLVTVSSGG |
| | | | GGSGGGGSGGGGSQTVVTQEPSLTVSPGGTVTLTCGSSTGAVTSGNY |
| | | | PNWVQQKPGQAPRGLIGGTKFLAPGTPARFSGSLLGGKAALTLSGVQ |
| | | | PEDEAEYYCVLWYSNRWVFGGGTKLTVLGGGGDKTHTCPPCPAPELL |
| | | | GGPSVFLFPPKPKDTLMISRTPEVTCVVVDVSHEDPEVKFNWYVDGV |
| | | | EVHNAKTKPCEEQYGSTYRCVSVLTVLHQDWLNGKEYKCKVSNKALP |
| | | | APIEKTISKAKGQPREPQVYTLPPSREEMTKNQVSLTCLVKGFYPSD |
| | | | IAVEWESNGQPENNYKTTPPVLDSDGSFFLYSKLTVDKSRWQQGNVF |
| | | | SCSVMHEALHNHYTQKSLSLSPGKGGGGSGGGGSGGGGSGGGGSGGG |
| | | | GSGGGGSDKTHTCPPCPAPELLGGPSVFLFPPKPKDTLMISRTPEVT |
| | | | CVVVDVSHEDPEVKFNWYVDGVEVHNAKTKPCEEQYGSTYRCVSVLT |
| | | | VLHQDWLNGKEYKCKVSNKALPAPIEKTISKAKGQPREPQVYTLPPS |
| | | | REEMTKNQVSLTCLVKGFYPSDIAVEWESNGQPENNYKTTPPVLDSD |
| | | | GSFFLYSKLTVDKSRWQQGNVFSCSVMHEALHNHYTQKSLSLSPGK |
| 473. | PM76-610 | bispecific | QVQLVESGGGLVKPGESLRLSCAASGFTFSDYYMYWVRQAPGKCLEW |
| | CC x12C0- | HLE | VAIISDGGYYTYYSDIIKGRFTISRDNAKNSLYLQMNSLKAEDTAVY |
| | scFc_delGK | molecule | YCARGFPLLRHGAMDYWGQGTLVTVSSGGGGSGGGGSGGGGSDIQMT |
| | | | QSPSSLSASVGDRVTITCKASQNVDTNVAWYQQKPGQAPKSLIYSAS |
| | | | YRYSDVPSRFSGSASGTDFTLTISSVQSEDFATYYCQQYDSYPYTFG |
| | | | CGTKLEIKSGGGGSEVQLVESGGGLVQPGGSLKLSCAASGFTFNKYA |
| | | | MNWVRQAPGKGLEWVARIRSKYNNYATYYADSVKDRFTISRDDSKNT |
| | | | AYLQMNNLKTEDTAVYYCVRHGNFGNSYISYWAYWGQGTLVTVSSGG |
| | | | GGSGGGGSGGGGSQTVVTQEPSLTVSPGGTVTLTCGSSTGAVTSGNY |
| | | | PNWVQQKPGQAPRGLIGGTKFLAPGTPARFSGSLLGGKAALTLSGVQ |
| | | | PEDEAEYYCVLWYSNRWVFGGGTKLTVLGGGGDKTHTCPPCPAPELL |
| | | | GGPSVFLFPPKPKDTLMISRTPEVTCVVVDVSHEDPEVKFNWYVDGV |
| | | | EVHNAKTKPCEEQYGSTYRCVSVLTVLHQDWLNGKEYKCKVSNKALP |
| | | | APIEKTISKAKGQPREPQVYTLPPSREEMTKNQVSLTCLVKGFYPSD |
| | | | IAVEWESNGQPENNYKTTPPVLDSDGSFFLYSKLTVDKSRWQQGNVF |
| | | | SCSVMHEALHNHYTQKSLSLSPGGGGSGGGGSGGGGSGGGGSGGGGS |
| | | | GGGGSDKTHTCPPCPAPELLGGPSVFLFPPKPKDTLMISRTPEVTCV |
| | | | VVDVSHEDPEVKFNWYVDGVEVHNAKTKPCEEQYGSTYRCVSVLTVL |
| | | | HQDWLNGKEYKCKVSNKALPAPIEKTISKAKGQPREPQVYTLPPSRE |
| | | | EMTKNQVSLTCLVKGFYPSDIAVEWESNGQPENNYKTTPPVLDSDGS |
| | | | FFLYSKLTVDKSRWQQGNVFSCSVMHEALHNHYTQKSLSLSPGK |
| 474. | PM 76-610 | bispecific | QVQLVESGGGLVKPGESLRLSCAASGFTFSDYYMYWVRQAPGKCLEW |
| | CC x 12C0 CC | molecule | VAIISDGGYYTYYSDIIKGRFTISRDNAKNSLYLQMNSLKAEDTAVY |
| | (103/43)-scFc | | YCARGFPLLRHGAMDYWGQGTLVTVSSGGGGSGGGGSGGGGSDIQMT |
| | | | QSPSSLSASVGDRVTITCKASQNVDTNVAWYQQKPGQAPKSLIYSAS |
| | | | YRYSDVPSRFSGSASGTDFTLTISSVQSEDFATYYCQQYDSYPYTFG |
| | | | CGTKLEIKSGGGGSEVQLVESGGGLVQPGGSLKLSCAASGFTFNKYA |
| | | | MNWVRQAPGKGLEWVARIRSKYNNYATYYADSVKDRFTISRDDSKNT |
| | | | AYLQMNNLKTEDTAVYYCVRHGNFGNSYISYWAYCGQGTLVTVSSGG |
| | | | GGSGGGGSGGGGSQTVVTQEPSLTVSPGGTVTLTCGSSTGAVTSGNY |
| | | | PNWVQQKPGQCPRGLIGGTKFLAPGTPARFSGSLLGGKAALTLSGVQ |
| | | | PEDEAEYYCVLWYSNRWVFGGGTKLTVL |
| 475. | PM76-610 | bispecific | QVQLVESGGGLVKPGESLRLSCAASGFTFSDYYMYWVRQAPGKCLEW |
| | CC x 12C0 CC | HLE | VAIISDGGYYTYYSDIIKGRFTISRDNAKNSLYLQMNSLKAEDTAVY |
| | (103/43)-scFc | molecule | YCARGFPLLRHGAMDYWGQGTLVTVSSGGGGSGGGGSGGGGSDIQMT |
| | | | QSPSSLSASVGDRVTITCKASQNVDTNVAWYQQKPGQAPKSLIYSAS |
| | | | YRYSDVPSRFSGSASGTDFTLTISSVQSEDFATYYCQQYDSYPYTFG |
| | | | CGTKLEIKSGGGGSEVQLVESGGGLVQPGGSLKLSCAASGFTFNKYA |
| | | | MNWVRQAPGKGLEWVARIRSKYNNYATYYADSVKDRFTISRDDSKNT |
| | | | AYLQMNNLKTEDTAVYYCVRHGNFGNSYISYWAYCGQGTLVTVSSGG |
| | | | GGSGGGGSGGGGSQTVVTQEPSLTVSPGGTVTLTCGSSTGAVTSGNY |
| | | | PNWVQQKPGQCPRGLIGGTKFLAPGTPARFSGSLLGGKAALTLSGVQ |
| | | | PEDEAEYYCVLWYSNRWVFGGGTKLTVLGGGGDKTHTCPPCPAPELL |
| | | | GGPSVFLFPPKPKDTLMISRTPEVTCVVVDVSHEDPEVKFNWYVDGV |
| | | | EVHNAKTKPCEEQYGSTYRCVSVLTVLHQDWLNGKEYKCKVSNKALP |
| | | | APIEKTISKAKGQPREPQVYTLPPSREEMTKNQVSLTCLVKGFYPSD |
| | | | IAVEWESNGQPENNYKTTPPVLDSDGSFFLYSKLTVDKSRWQQGNVF |
| | | | SCSVMHEALHNHYTQKSLSLSPGKGGGGSGGGGSGGGGSGGGGSGGG |
| | | | GSGGGGSDKTHTCPPCPAPELLGGPSVFLFPPKPKDTLMISRTPEVT |
| | | | CVVVDVSHEDPEVKFNWYVDGVEVHNAKTKPCEEQYGSTYRCVSVLT |
| | | | VLHQDWLNGKEYKCKVSNKALPAPIEKTISKAKGQPREPQVYTLPPS |
| | | | REEMTKNQVSLTCLVKGFYPSDIAVEWESNGQPENNYKTTPPVLDSD |
| | | | GSFFLYSKLTVDKSRWQQGNVFSCSVMHEALHNHYTQKSLSLSPGK |
| 476. | PM 76-1310 | bispecific | QVQLVESGGGLVKPGESLRLSCAASGFTFSDYYMYWVRQAPGKCLEW |
| | CC x 12C0 CC | HLE | VAIISDGGYYTYYSDIIKGRFTISRDNAKNSLYLQMNSLKAEDTAVY |
| | (103/43)- | molecule | YCARGFPLLRHGAMDYWGQGTLVTVSSGGGGSGGGGSGGGGSDIQMT |
| | scFc_delGK | | QSPSSLSASVGDRVTITCKASQNVDTNVAWYQQKPGQAPKSLIYSAS |
| | | | YRYSDVPSRFSGSASGTDFTLTISSVQSEDFATYYCQQYDSYPYTFG |
| | | | CGTKLEIKSGGGGSEVQLVESGGGLVQPGGSLKLSCAASGFTFNKYA |
| | | | MNWVRQAPGKGLEWVARIRSKYNNYATYYADSVKDRFTISRDDSKNT |
| | | | AYLQMNNLKTEDTAVYYCVRHGNFGNSYISYWAYCGQGTLVTVSSGG |
| | | | GGSGGGGSGGGGSQTVVTQEPSLTVSPGGTVTLTCGSSTGAVTSGNY |
| | | | PNWVQQKPGQCPRGLIGGTKFLAPGTPARFSGSLLGGKAALTLSGVQ |
| | | | PEDEAEYYCVLWYSNRWVFGGGTKLTVLGGGGDKTHTCPPCPAPELL |
| | | | GGPSVFLFPPKPKDTLMISRTPEVTCVVVDVSHEDPEVKFNWYVDGV |
| | | | EVHNAKTKPCEEQYGSTYRCVSVLTVLHQDWLNGKEYKCKVSNKALP |
| | | | APIEKTISKAKGQPREPQVYTLPPSREEMTKNQVSLTCLVKGFYPSD |
| | | | IAVEWESNGQPENNYKTTPPVLDSDGSFFLYSKLTVDKSRWQQGNVF |
| | | | SCSVMHEALHNHYTQKSLSLSPGGGGSGGGGSGGGGSGGGGSGGGGS |
| | | | GGGGSDKTHTCPPCPAPELLGGPSVFLFPPKPKDTLMISRTPEVTCV |
| | | | VVDVSHEDPEVKFNWYVDGVEVHNAKTKPCEEQYGSTYRCVSVLTVL |
| | | | HQDWLNGKEYKCKVSNKALPAPIEKTISKAKGQPREPQVYTLPPSRE |
| | | | EMTKNQVSLTCLVKGFYPSDIAVEWESNGQPENNYKTTPPVLDSDGS |
| | | | FFLYSKLTVDKSRWQQGNVFSCSVMHEALHNHYTQKSLSLSPGK |
| 477. | IgG1 hinge | | DKTHTCPPCP |
| 478. | IgG2 hinge | | ERKCCVECPPCP |
| 479. | IgG3 hinge | | ELKTPLDTTHTCPRCP |
| 480. | IgG4 hinge | | ESKYGPPCPSCP |
| 481. | EGFRvIIIccx12 | bispecific | QVQLVESGGGVVQSGRSLRLSCAASGFTFRNYGMHWVRQAPGKCLEW |
| | C-Hinge-CH2- | HLE | VAVIWYDGSDKYYADSVRGRFTISRDNSKNTLYLQMNSLRAEDTAVY |
| | CH3-linker- | molecule | YCARDGYDILTGNPRDFDYWGQGTLVTVSSGGGGSGGGGSGGGGSDT |
| | hinge-CH2- | | VMTQTPLSSHVTLGQPASISCRSSQSLVHSDGNTYLSWLQQRPGQPP |
| | CH3 | | RLLIYRISRRFSGVPDRFSGSGAGTDFTLEISRVEAEDVGVYYCMQS |
| | (DF9) | | THVPRTFGCGTKVEIKSGGGGSEVQLVESGGGLVQPGGSLKLSCAAS |
| | | | GFTFNKYAMNWVRQAPGKGLEWVARIRSKYNNYATYYADSVKDRFTI |
| | | | SRDDSKNTAYLQMNNLKTEDTAVYYCVRHGNFGNSYISYWAYWGQGT |
| | | | LVTVSSGGGGSGGGGSGGGGSQTVVTQEPSLTVSPGGTVTLTCGSST |
| | | | GAVTSGNYPNWVQQKPGQAPRGLIGGTKFLAPGTPARFSGSLLGGKA |
| | | | ALTLSGVQPEDEAEYYCVLWYSNRWVFGGGTKLTVLGGGGDKTHTCP |
| | | | PCPAPELLGGPSVFLFPPKPKDTLMISRTPEVTCVVVDVSHEDPEVK |
| | | | FNWYVDGVEVHNAKTKPCEEQYGSTYRCVSVLTVLHQDWLNGKEYKC |
| | | | KVSNKALPAPIEKTISKAKGQPREPQVYTLPPSREEMTKNQVSLTCL |
| | | | VKGFYPSDIAVEWESNGQPENNYKTTPPVLDSDGSFFLYSKLTVDKS |
| | | | RWQQGNVFSCSVMHEALHNHYTQKSLSLSPGKGGGGSGGGGSGGGGS |
| | | | GGGGSGGGGSGGGGSDKTHTCPPCPAPELLGGPSVFLFPPKPKDTLM |
| | | | ISRTPEVTCVVVDVSHEDPEVKFNWYVDGVEVHNAKTKPCEEQYGST |
| | | | YRCVSVLTVLHQDWLNGKEYKCKVSNKALPAPIEKTISKAKGQPREP |
| | | | QVYTLPPSREEMTKNQVSLTCLVKGFYPSDIAVEWESNGQPENNYKT |
| | | | TPPVLDSDGSFFLYSKLTVDKSRWQQGNVFSCSVMHEALHNHYTQKS |
| | | | LSLSPGK |
| 482. | EGFRvIIIccx12 | bispecific | QvQLvESGGGVVQSGRSLRLSCAASGFTFRNYGMHWVRQAPGKCLEW |
| | C-Hinge-CH2- | HLE | VAVIWYDGSDKYYADSVRGRFTISRDNSKNTLYLQMNSLRAEDTAVY |
| | CH3-linker- | molecule | YCARDGYDILTGNPRDFDYWGQGTLVTVSSGGGGSGGGGSGGGGSDT |
| | CH2-CH3 | | VMTQTPLSSHVTLGQPASISCRSSQSLVHSDGNTYLSWLQQRPGQPP |
| | (T2G) | | RLLIYRISRRFSGVPDRFSGSGAGTDFTLEISRVEAEDVGVYYCMQS |
| | | | THVPRTFGCGTKVEIKSGGGGSEVQLVESGGGLVQPGGSLKLSCAAS |
| | | | GFTFNKYAMNWVRQAPGKGLEWVARIRSKYNNYATYYADSVKDRFTI |
| | | | SRDDSKNTAYLQMNNLKTEDTAVYYCVRHGNFGNSYISYWAYWGQGT |
| | | | LVTVSSGGGGSGGGGSGGGGSQTVVTQEPSLTVSPGGTVTLTCGSST |
| | | | GAVTSGNYPNWVQQKPGQAPRGLIGGTKFLAPGTPARFSGSLLGGKA |
| | | | ALTLSGVQPEDEAEYYCVLWYSNRWVFGGGTKLTVLGGGGDKTHTCP |
| | | | PCPAPELLGGPSVFLFPPKPKDTLMISRTPEVTCVVVDVSHEDPEVK |
| | | | FNWYVDGVEVHNAKTKPCEEQYGSTYRCVSVLTVLHQDWLNGKEYKC |
| | | | KVSNKALPAPIEKTISKAKGQPREPQVYTLPPSREEMTKNQVSLTCL |
| | | | VKGFYPSDIAVEWESNGQPENNYKTTPPVLDSDGSFFLYSKLTVDKS |
| | | | RWQQGNVFSCSVMHEALHNHYTQKSLSLSPGKGGGGSGGGGSGGGGS |
| | | | GGGGSGGGGSGGGGSAPELLGGPSVFLFPPKPKDTLMISRTPEVTCV |
| | | | VVDVSHEDPEVKFNWYVDGVEVHNAKTKPCEEQYGSTYRCVSVLTVL |
| | | | HQDWLNGKEYKCKVSNKALPAPIEKTISKAKGQPREPQVYTLPPSRE |
| | | | EMTKNQVSLTCLVKGFYPSDIAVEWESNGQPENNYKTTPPVLDSDGS |
| | | | FFLYSKLTVDKSRWQQGNVFSCSVMHEALHNHYTQKSLSLSPGK |
| 483. | EGFRvIIIccx12 | bispecific | QVQLVESGGGVVQSGRSLRLSCAASGFTFRNYGMHWVRQAPGKCLEW |
| | C-Hinge- | HLE | VAVIWYDGSDKYYADSVRGRFTISRDNSKNTLYLQMNSLRAEDTAVY |
| | CH2-linker- | molecule | YCARDGYDILTGNPRDFDYWGQGTLVTVSSGGGGSGGGGSGGGGSDT |
| | Hinge-CH2- | | VMTQTPLSSHVTLGQPASISCRSSQSLVHSDGNTYLSWLQQRPGQPP |
| | CH3-linker- | | RLLIYRISRRFSGVPDRFSGSGAGTDFTLEISRVEAEDVGVYYCMQS |
| | CH3 | | THVPRTFGCGTKVEIKSGGGGSEVQLVESGGGLVQPGGSLKLSCAAS |
| | (D3L) | | GFTFNKYAMNWVRQAPGKGLEWVARIRSKYNNYATYYADSVKDRFTI |
| | | | SRDDSKNTAYLQMNNLKTEDTAVYYCVRHGNFGNSYISYWAYWGQGT |
| | | | LVTVSSGGGGSGGGGSGGGGSQTVVTQEPSLTVSPGGTVTLTCGSST |
| | | | GAVTSGNYPNWVQQKPGQAPRGLIGGTKFLAPGTPARFSGSLLGGKA |
| | | | ALTLSGVQPEDEAEYYCVLWYSNRWVFGGGTKLTVLGGGGDKTHTCP |
| | | | PCPAPELLGGPSVFLFPPKPKDTLMISRTPEVTCVVVDVSHEDPEVK |
| | | | FNWYVDGVEVHNAKTKPCEEQYGSTYRCVSVLTVLHQDWLNGKEYKC |
| | | | KVSNKALPAPIEKTISKAKGGGGSGGGGSGGGGSGGGGSDKTHTCPP |
| | | | CPAPELLGGPSVFLFPPKPKDTLMISRTPEVTCVVVDVSHEDPEVKF |
| | | | NWYVDGVEVHNAKTKPCEEQYGSTYRCVSVLTVLHQDWLNGKEYKCK |
| | | | VSNKALPAPIEKTISKAKGQPREPQVYTLPPSREEMTKNQVSLTCLV |
| | | | KGFYPSDIAVEWESNGQPENNYKTTPPVLDSDGSFFLYSKLTVDKSR |
| | | | WQQGNVFSCSVMHEALHNHYTQKSLSLSPGKGGGGSGGGGSGGGGSG |
| | | | GGGSGQPREPQVYTLPPSREEMTKNQVSLTCLVKGFYPSDIAVEWES |
| | | | NGQPENNYKTTPPVLDSDGSFFLYSKLTVDKSRWQQGNVFSCSVMHE |
| | | | ALHNHYTQKSLSLSPGK |
| 484. | EGFRvIIIccx12 | bispecific | QvQLvESGGGVVQSGRSLRLSCAASGFTFRNYGMHWVRQAPGKCLEW |
| | C-Hinge- | HLE | VAVIWYDGSDKYYADSVRGRFTISRDNSKNTLYLQMNSLRAEDTAVY |
| | CH2-linker- | molecule | YCARDGYDILTGNPRDFDYWGQGTLVTVSSGGGGSGGGGSGGGGSDT |
| | CH2-CH3- | | VMTQTPLSSHVTLGQPASISCRSSQSLVHSDGNTYLSWLQQRPGQPP |
| | linker-CH3 | | RLLIYRISRRFSGVPDRFSGSGAGTDFTLEISRVEAEDVGVYYCMQS |
| | (T7I) | | THVPRTFGCGTKVEIKSGGGGSEVQLVESGGGLVQPGGSLKLSCAAS |
| | | | GFTFNKYAMNWVRQAPGKGLEWVARIRSKYNNYATYYADSVKDRFTI |
| | | | SRDDSKNTAYLQMNNLKTEDTAVYYCVRHGNFGNSYISYWAYWGQGT |
| | | | LVTVSSGGGGSGGGGSGGGGSQTVVTQEPSLTVSPGGTVTLTCGSST |
| | | | GAVTSGNYPNWVQQKPGQAPRGLIGGTKFLAPGTPARFSGSLLGGKA |
| | | | ALTLSGVQPEDEAEYYCVLWYSNRWVFGGGTKLTVLGGGGDKTHTCP |
| | | | PCPAPELLGGPSVFLFPPKPKDTLMISRTPEVTCVVVDVSHEDPEVK |
| | | | FNWYVDGVEVHNAKTKPCEEQYGSTYRCVSVLTVLHQDWLNGKEYKC |
| | | | KVSNKALPAPIEKTISKAKGGGGSGGGGSGGGGSGGGGSAPELLGGP |
| | | | SVFLFPPKPKDTLMISRTPEVTCVVVDVSHEDPEVKFNWYVDGVEVH |
| | | | NAKTKPCEEQYGSTYRCVSVLTVLHQDWLNGKEYKCKVSNKALPAPI |
| | | | EKTISKAKGQPREPQVYTLPPSREEMTKNQVSLTCLVKGFYPSDIAV |
| | | | EWESNGQPENNYKTTPPVLDSDGSFFLYSKLTVDKSRWQQGNVFSCS |
| | | | VMHEALHNHYTQKSLSLSPGKGGGGSGGGGSGGGGSGGGGSGQPREP |
| | | | QVYTLPPSREEMTKNQVSLTCLVKGFYPSDIAVEWESNGQPENNYKT |
| | | | TPPVLDSDGSFFLYSKLTVDKSRWQQGNVFSCSVMHEALHNHYTQKS |
| | | | LSLSPGK |
| 485. | EGFRvIIIccx12 | bispecific | QVQLVESGGGVVQSGRSLRLSCAASGFTFRNYGMHWVRQAPGKCLEW |
| | C-CH2-linker- | HLE | VAVIWYDGSDKYYADSVRGRFTISRDNSKNTLYLQMNSLRAEDTAVY |
| | CH2-CH3- | molecule | YCARDGYDILTGNPRDFDYWGQGTLVTVSSGGGGSGGGGSGGGGSDT |
| | linker-CH3 | | VMTQTPLSSHVTLGQPASISCRSSQSLVHSDGNTYLSWLQQRPGQPP |
| | (K6C) | | RLLIYRISRRFSGVPDRFSGSGAGTDFTLEISRVEAEDVGVYYCMQS |
| | | | THVPRTFGCGTKVEIKSGGGGSEVQLVESGGGLVQPGGSLKLSCAAS |
| | | | GFTFNKYAMNWVRQAPGKGLEWVARIRSKYNNYATYYADSVKDRFTI |
| | | | SRDDSKNTAYLQMNNLKTEDTAVYYCVRHGNFGNSYISYWAYWGQGT |
| | | | LVTVSSGGGGSGGGGSGGGGSQTVVTQEPSLTVSPGGTVTLTCGSST |
| | | | GAVTSGNYPNWVQQKPGQAPRGLIGGTKFLAPGTPARFSGSLLGGKA |
| | | | ALTLSGVQPEDEAEYYCVLWYSNRWVFGGGTKLTVLGGGGAPELLGG |
| | | | PSVFLFPPKPKDTLMISRTPEVTCVVVDVSHEDPEVKFNWYVDGVEV |
| | | | HNAKTKPCEEQYGSTYRCVSVLTVLHQDWLNGKEYKCKVSNKALPAP |
| | | | IEKTISKAKGGGGSGGGGSGGGGSGGGGSAPELLGGPSVFLFPPKPK |
| | | | DTLMISRTPEVTCVVVDVSHEDPEVKFNWYVDGVEVHNAKTKPCEEQ |
| | | | YGSTYRCVSVLTVLHQDWLNGKEYKCKVSNKALPAPIEKTISKAKGQ |
| | | | PREPQVYTLPPSREEMTKNQVSLTCLVKGFYPSDIAVEWESNGQPEN |
| | | | NYKTTPPVLDSDGSFFLYSKLTVDKSRWQQGNVFSCSVMHEALHNHY |
| | | | TQKSLSLSPGKGGGGSGGGGSGGGGSGGGGSGQPREPQVYTLPPSRE |
| | | | EMTKNQVSLTCLVKGFYPSDIAVEWESNGQPENNYKTTPPVLDSDGS |
| | | | FFLYSKLTVDKSRWQQGNVFSCSVMHEALHNHYTQKSLSLSPGK |
| 486. | IgG3 hinge | | ELKTPLGDTTHTCPRCP |
| 487. | IgG1 hinge | | EPKSCDKTHTCPPCP |

1. An antibody construct comprising:
a first domain which binds to prostate-specific membrane antigen (PSMA),
a second domain which binds to an extracellular epitope of the human and the Macaca CD3ε chain; and
a third domain which comprises two polypeptide monomers, each comprising a hinge, a CH2 domain and a CH3 domain, wherein said two polypeptide monomers are fused to each other via a peptide linker.

2. The antibody construct of claim 1, wherein the antibody construct is a single chain antibody construct.

3. The antibody construct of claim 1, wherein said third domain comprises in an amino to carboxyl order:
hinge-CH2-CH3-linker-hinge-CH2-CH3.

4. The antibody construct of claim 1, wherein each of said polypeptide monomers has an amino acid sequence that is at least 90% identical to a sequence selected from the group consisting of: SEQ ID NOs: 17-24.

5. The antibody construct of claim 4, wherein each of said polypeptide monomers has an amino acid sequence selected from the group consisting of SEQ ID NOs: 17-24.

6. The antibody construct of claim 1, wherein the CH2 domain comprises an intra domain cysteine disulfide bridge.

7. The antibody construct of claim 1, wherein
(i) the first domain comprises two antibody variable domains and the second domain comprises two antibody variable domains;
(ii) the first domain comprises one antibody variable domain and the second domain comprises two antibody variable domains;
(iii) the first domain comprises two antibody variable domains and the second domain comprises one antibody variable domain; or
(iv) the first domain comprises one antibody variable domain and the second domain comprises one antibody variable domain.

8. The antibody construct of claim 1, wherein the first and second domain are fused to the third domain via a peptide linker.

9. The antibody construct of claim 1, wherein the antibody construct comprises in an amino to carboxyl order:
(a) the first domain;
(b) a peptide linker having an amino acid sequence selected from the group consisting of SEQ ID NOs: 1-3;
(c) the second domain;
(d) a peptide linker having an amino acid sequence selected from the group consisting of SEQ ID NOs: 1, 2, 3, 9, 10, 11 and 12;
(e) the first polypeptide monomer of the third domain;
(f) a peptide linker having an amino acid sequence selected from the group consisting of SEQ ID NOs: 5, 6, 7 and 8; and
(g) the second polypeptide monomer of the third domain.

10. The antibody construct of claim 1, wherein the antibody construct comprises in an amino to carboxyl order:
(a) the first domain having an amino acid sequence selected from the group consisting of SEQ ID NOs: 50, 56, 68, 74, 86, 92, 104, 110, 122, 128, 140, 146, 158, 164, 176, 182, 194, 200, 212, 218, 230, 236, 248, 254, 266, 272, 284, 290, 302, 308, 320, 335, 350, 365, 380, 395, 410, 425, 440, 455, and 470;
(b) a peptide linker having an amino acid sequence selected from the group consisting of SEQ ID NOs: 1-3;
(c) the second domain having an amino acid sequence selected from the group consisting of SEQ ID NOs: 23, 25, 41, 43, 59, 61, 77, 79, 95, 97, 113, 115, 131, 133, 149, 151, 167, 169, 185 or 187 of WO 2008/119567 or as depicted in SEQ ID NO: 15;
(d) a peptide linker having an amino acid sequence selected from the group consisting of SEQ ID NOs: 1, 2, 3, 9, 10, 11 and 12;
(e) the first polypeptide monomer of the third domain having a polypeptide sequence selected from the group consisting of SEQ ID NOs: 17-24;
(f) a peptide linker having an amino acid sequence selected from the group consisting of SEQ ID NOs: 5, 6, 7 and 8; and
(g) the second polypeptide monomer of the third domain having a polypeptide sequence selected from the group consisting of SEQ ID NOs: 17-24.

11. The antibody construct of claim 10 comprising an amino acid sequence selected from the group consisting of:
SEQ ID NOs: 52, 53, 58, 59, 70, 71, 76, 77, 88, 89, 94, 95, 106, 107, 112, 113, 124, 125, 130, 131, 142, 143, 148, 149, 160, 161, 166, 167, 178, 179, 184, 185, 196, 197, 202, 203, 214, 215, 220, 221, 232, 233, 238, 239, 250, 251, 256, 257, 268, 269, 274, 275, 286, 287, 292, 293, 304 305, 310, 311, 322, 323, 325, 326, 337, 338, 340, 341, 352, 353, 355, 356, 367, 368, 370, 371, 382, 383, 385, 386, 397, 398, 400, 401, 412, 413, 415, 416, 427, 428, 430, 431, 442, 443, 445, 446, 457, 458, 460, 461, 472, 473, 475 and 476.

12. A polynucleotide encoding the antibody construct of claim 1.

13. A vector comprising the polynucleotide of claim 12.

14. A host cell transformed or transfected with the polynucleotide of claim 12.

15. A process for producing the antibody construct of claim 1, said process comprising culturing a host cell transformed or transfected with the polynucleotide encoding the antibody construct comprising:
a first domain which binds to prostate-specific membrane antigen (PSMA),
a second domain which binds to an extracellular epitope of the human and the Macaca CD3ε chain; and
a third domain which comprises two polypeptide monomers, each comprising a hinge, a CH2 domain and a CH3 domain, wherein said two polypeptide monomers are fused to each other via a peptide linker
under conditions allowing the expression of the antibody construct, and recovering the antibody construct from the culture.

16. A pharmaceutical composition comprising the antibody construct to of claim 1 and a carrier, stabilizer, excipient, diluent, solubilizer, surfactant, emulsifier, preservative or adjuvant.

17-19. (canceled)

20. A method of treating or ameliorating a proliferative disease, a tumorous disease, a cancer, or an immunological disorder comprising the step of administering to a subject in need thereof an effective amount of the antibody construct according to claim 1.

21. A kit comprising the antibody construct according to claim 1 packaged in a container or recipient.

22. The kit of claim 21 further comprising directions for use.

23. The method of claim 20, wherein the cancer is prostate cancer.

The application's sequence listing, which the Patent Office published only in electronic form, follows.

SEQUENCE LISTING (487 sequences)

SEQ ID NO: 1 - protein, 5 aa, Artificial Sequence
  Synthetic peptide
GGGGS

SEQ ID NO: 2 - protein, 10 aa, Artificial Sequence
  Synthetic peptide
GGGGSGGGGS

SEQ ID NO: 3 - protein, 15 aa, Artificial Sequence
  Synthetic peptide
GGGGSGGGGSGGGGS

SEQ ID NO: 4 - protein, 20 aa, Artificial Sequence
  Synthetic peptide
GGGGSGGGGSGGGGSGGGGS

SEQ ID NO: 5 - protein, 25 aa, Artificial Sequence
  Synthetic peptide
GGGGSGGGGSGGGGSGGGGSGGGGS

SEQ ID NO: 6 - protein, 30 aa, Artificial Sequence
  Synthetic peptide
GGGGSGGGGSGGGGSGGGGSGGGGSGGGGS

SEQ ID NO: 7 - protein, 35 aa, Artificial Sequence
  Synthetic peptide
GGGGSGGGGSGGGGSGGGGSGGGGSGGGGSGGGGS

SEQ ID NO: 8 - protein, 40 aa, Artificial Sequence
  Synthetic peptide
GGGGSGGGGSGGGGSGGGGSGGGGSGGGGSGGGGSGGGGS

SEQ ID NO: 9 - protein, 6 aa, Artificial Sequence
  Synthetic peptide
PGGGGS

SEQ ID NO: 10 - protein, 6 aa, Artificial Sequence
  Synthetic peptide
PGGDGS

SEQ ID NO: 11 - protein, 6 aa, Artificial Sequence
  Synthetic peptide
SGGGGS

SEQ ID NO: 12 - protein, 4 aa, Artificial Sequence
  Synthetic peptide
GGGG

SEQ ID NO: 13 - protein, 109 aa, Artificial Sequence
  Synthetic peptide
QTVVTQEPSLTVSPGGTVTLTCGSSTGAVTSGNYPNWVQQKPGQAPRGLIGGTKFLAPGTPARFSGSLLGGKAALTLSGVQPEDEAEYYCVLWYSNRWVFGGGTKLTVL

SEQ ID NO: 14 - protein, 125 aa, Artificial Sequence
  Synthetic peptide
EVQLVESGGGLVQPGGSLRLSCAASGFTFNSYAMNWVRQAPGKGLEWVARIRSKYNNYATYYADSVKGRFTISRDDSKNTAYLQMNSLKTEDTAVYYCVRHGNFGNSYVSWWAYWGQGTLVTVSS

SEQ ID NO: 15 - protein, 249 aa, Artificial Sequence
  Synthetic peptide
EVQLVESGGGLVQPGGSLRLSCAASGFTFNSYAMNWVRQAPGKGLEWVARIRSKYNNYATYYADSVKGRFTISRDDSKNTAYLQMNSLKTEDTAVYYCVRHGNFGNSYVSWWAYWGQGTLVTVSSGGGGSGGGGSGGGGSQTVVTQEPSLTVSPGGTVTLTCGSSTGAVTSGNYPNWVQQKPGQAPRGLIGGTKFLAPGTPARFSGSLLGGKAALTLSGVQPEDEAEYYCVLWYSNRWVFGGGTKLTVL

SEQ ID NO: 16 - protein, 6 aa, Artificial Sequence
  Synthetic peptide
HHHHHH

SEQ ID NO: 17 - protein, 227 aa, Artificial Sequence
  Synthetic peptide
DKTHTCPPCPAPELLGGPSVFLFPPKPKDTLMISRTPEVTCVVVDVSHEDPEVKFNWYVDGVEVHNAKTKPCEEQYGSTYRCVSVLTVLHQDWLNGKEYKCKVSNKALPAPIEKTISKAKGQPREPQVYTLPPSREEMTKNQVSLTCLVKGFYPSDIAVEWESNGQPENNYKTTPPVLDSDGSFFLYSKLTVDKSRWQQGNVFSCSVMHEALHNHYTQKSLSLSPGK

SEQ ID NO: 18 - protein, 225 aa, Artificial Sequence
  Synthetic peptide
DKTHTCPPCPAPELLGGPSVFLFPPKPKDTLMISRTPEVTCVVVDVSHEDPEVKFNWYVDGVEVHNAKTKPCEEQYGSTYRCVSVLTVLHQDWLNGKEYKCKVSNKALPAPIEKTISKAKGQPREPQVYTLPPSREEMTKNQVSLTCLVKGFYPSDIAVEWESNGQPENNYKTTPPVLDSDGSFFLYSKLTVDKSRWQQGNVFSCSVMHEALHNHYTQKSLSLSP

SEQ ID NO: 19 - protein, 227 aa, Artificial Sequence
  Synthetic peptide
DKTHTCPPCPAPELLGGPSVFLFPPKPKDTLMISRTPEVTCVVVDVSHEDPEVKFNWYVDGVEVHNAKTKPREEQYNSTYRVVSVLTVLHQDWLNGKEYKCKVSNKALPAPIEKTISKAKGQPREPQVYTLPPSREEMTKNQVSLTCLVKGFYPSDIAVEWESNGQPENNYKTTPPVLDSDGSFFLYSKLTVDKSRWQQGNVFSCSVMHEALHNHYTQKSLSLSPGK

SEQ ID NO: 20 - protein, 225 aa, Artificial Sequence
  Synthetic peptide
DKTHTCPPCPAPELLGGPSVFLFPPKPKDTLMISRTPEVTCVVVDVSHEDPEVKFNWYVDGVEVHNAKTKPREEQYNSTYRVVSVLTVLHQDWLNGKEYKCKVSNKALPAPIEKTISKAKGQPREPQVYTLPPSREEMTKNQVSLTCLVKGFYPSDIAVEWESNGQPENNYKTTPPVLDSDGSFFLYSKLTVDKSRWQQGNVFSCSVMHEALHNHYTQKSLSLSP

SEQ ID NO: 21 - protein, 227 aa, Artificial Sequence
  Synthetic peptide
DKTHTCPPCPAPELLGGPSVFLFPPKPKDTLMISRTPEVTCVVVDVSHEDPEVKFNWYVDGVEVHNAKTKPREEQYGSTYRVVSVLTVLHQDWLNGKEYKCKVSNKALPAPIEKTISKAKGQPREPQVYTLPPSREEMTKNQVSLTCLVKGFYPSDIAVEWESNGQPENNYKTTPPVLDSDGSFFLYSKLTVDKSRWQQGNVFSCSVMHEALHNHYTQKSLSLSPGK

SEQ ID NO: 22 - protein, 225 aa, Artificial Sequence
  Synthetic peptide
DKTHTCPPCPAPELLGGPSVFLFPPKPKDTLMISRTPEVTCVVVDVSHEDPEVKFNWYVDGVEVHNAKTKPREEQYGSTYRVVSVLTVLHQDWLNGKEYKCKVSNKALPAPIEKTISKAKGQPREPQVYTLPPSREEMTKNQVSLTCLVKGFYPSDIAVEWESNGQPENNYKTTPPVLDSDGSFFLYSKLTVDKSRWQQGNVFSCSVMHEALHNHYTQKSLSLSP

SEQ ID NO: 23 - protein, 227 aa, Artificial Sequence
  Synthetic peptide
DKTHTCPPCPAPELLGGPSVFLFPPKPKDTLMISRTPEVTCVVVDVSHEDPEVKFNWYVDGVEVHNAKTKPCEEQYNSTYRCVSVLTVLHQDWLNGKEYKCKVSNKALPAPIEKTISKAKGQPREPQVYTLPPSREEMTKNQVSLTCLVKGFYPSDIAVEWESNGQPENNYKTTPPVLDSDGSFFLYSKLTVDKSRWQQGNVFSCSVMHEALHNHYTQKSLSLSPGK

SEQ ID NO: 24 - protein, 225 aa, Artificial Sequence
  Synthetic peptide
DKTHTCPPCPAPELLGGPSVFLFPPKPKDTLMISRTPEVTCVVVDVSHEDPEVKFNWYVDGVEVHNAKTKPCEEQYNSTYRCVSVLTVLHQDWLNGKEYKCKVSNKALPAPIEKTISKAKGQPREPQVYTLPPSREEMTKNQVSLTCLVKGFYPSDIAVEWESNGQPENNYKTTPPVLDSDGSFFLYSKLTVDKSRWQQGNVFSCSVMHEALHNHYTQKSLSLSP

SEQ ID NO: 25 - protein, 484 aa, Artificial Sequence
  Synthetic peptide
DKTHTCPPCPAPELLGGPSVFLFPPKPKDTLMISRTPEVTCVVVDVSHEDPEVKFNWYVDGVEVHNAKTKPCEEQYGSTYRCVSVLTVLHQDWLNGKEYKCKVSNKALPAPIEKTISKAKGQPREPQVYTLPPSREEMTKNQVSLTCLVKGFYPSDIAVEWESNGQPENNYKTTPPVLDSDGSFFLYSKLTVDKSRWQQGNVFSCSVMHEALHNHYTQKSLSLSPGKGGGGSGGGGSGGGGSGGGGSGGGGSGGGGSDKTHTCPPCPAPELLGGPSVFLFPPKPKDTLMISRTPEVTCVVVDVSHEDPEVKFNWYVDGVEVHNAKTKPCEEQYGSTYRCVSVLTVLHQDWLNGKEYKCKVSNKALPAPIEKTISKAKGQPREPQVYTLPPSREEMTKNQVSLTCLVKGFYPSDIAVEWESNGQPENNYKTTPPVLDSDGSFFLYSKLTVDKSRWQQGNVFSCSVMHEALHNHYTQKSLSLSPGK

SEQ ID NO: 26 - protein, 480 aa, Artificial Sequence
  Synthetic peptide
DKTHTCPPCPAPELLGGPSVFLFPPKPKDTLMISRTPEVTCVVVDVSHEDPEVKFNWYVDGVEVHNAKTKPCEEQYGSTYRCVSVLTVLHQDWLNGKEYKCKVSNKALPAPIEKTISKAKGQPREPQVYTLPPSREEMTKNQVSLTCLVKGFYPSDIAVEWESNGQPENNYKTTPPVLDSDGSFFLYSKLTVDKSRWQQGNVFSCSVMHEALHNHYTQKSLSLSPGGGGSGGGGSGGGGSGGGGSGGGGSGGGGSDKTHTCPPCPAPELLGGPSVFLFPPKPKDTLMISRTPEVTCVVVDVSHEDPEVKFNWYVDGVEVHNAKTKPCEEQYGSTYRCVSVLTVLHQDWLNGKEYKCKVSNKALPAPIEKTISKAKGQPREPQVYTLPPSREEMTKNQVSLTCLVKGFYPSDIAVEWESNGQPENNYKTTPPVLDSDGSFFLYSKLTVDKSRWQQGNVFSCSVMHEALHNHYTQKSLSLSP

SEQ ID NO: 27 - protein, 484 aa, Artificial Sequence
  Synthetic peptide
DKTHTCPPCPAPELLGGPSVFLFPPKPKDTLMISRTPEVTCVVVDVSHEDPEVKFNWYVDGVEVHNAKTKPREEQYNSTYRVVSVLTVLHQDWLNGKEYKCKVSNKALPAPIEKTISKAKGQPREPQVYTLPPSREEMTKNQVSLTCLVKGFYPSDIAVEWESNGQPENNYKTTPPVLDSDGSFFLYSKLTVDKSRWQQGNVFSCSVMHEALHNHYTQKSLSLSPGKGGGGSGGGGSGGGGSGGGGSGGGGSGGGGSDKTHTCPPCPAPELLGGPSVFLFPPKPKDTLMISRTPEVTCVVVDVSHEDPEVKFNWYVDGVEVHNAKTKPREEQYNSTYRVVSVLTVLHQDWLNGKEYKCKVSNKALPAPIEKTISKAKGQPREPQVYTLPPSREEMTKNQVSLTCLVKGFYPSDIAVEWESNGQPENNYKTTPPVLDSDGSFFLYSKLTVDKSRWQQGNVFSCSVMHEALHNHYTQKSLSLSPGK

SEQ ID NO: 28 - protein, 480 aa, Artificial Sequence
  Synthetic peptide
DKTHTCPPCPAPELLGGPSVFLFPPKPKDTLMISRTPEVTCVVVDVSHEDPEVKFNWYVDGVEVHNAKTKPREEQYNSTYRVVSVLTVLHQDWLNGKEYKCKVSNKALPAPIEKTISKAKGQPREPQVYTLPPSREEMTKNQVSLTCLVKGFYPSDIAVEWESNGQPENNYKTTPPVLDSDGSFFLYSKLTVDKSRWQQGNVFSCSVMHEALHNHYTQKSLSLSPGGGGSGGGGSGGGGSGGGGSGGGGSGGGGSDKTHTCPPCPAPELLGGPSVFLFPPKPKDTLMISRTPEVTCVVVDVSHEDPEVKFNWYVDGVEVHNAKTKPREEQYNSTYRVVSVLTVLHQDWLNGKEYKCKVSNKALPAPIEKTISKAKGQPREPQVYTLPPSREEMTKNQVSLTCLVKGFYPSDIAVEWESNGQPENNYKTTPPVLDSDGSFFLYSKLTVDKSRWQQGNVFSCSVMHEALHNHYTQKSLSLSP

SEQ ID NO: 29 - protein, 484 aa, Artificial Sequence
  Synthetic peptide
DKTHTCPPCPAPELLGGPSVFLFPPKPKDTLMISRTPEVTCVVVDVSHEDPEVKFNWYVDGVEVHNAKTKPREEQYGSTYRVVSVLTVLHQDWLNGKEYKCKVSNKALPAPIEKTISKAKGQPREPQVYTLPPSREEMTKNQVSLTCLVKGFYPSDIAVEWESNGQPENNYKTTPPVLDSDGSFFLYSKLTVDKSRWQQGNVFSCSVMHEALHNHYTQKSLSLSPGKGGGGSGGGGSGGGGSGGGGSGGGGSGGGGSDKTHTCPPCPAPELLGGPSVFLFPPKPKDTLMISRTPEVTCVVVDVSHEDPEVKFNWYVDGVEVHNAKTKPREEQYGSTYRVVSVLTVLHQDWLNGKEYKCKVSNKALPAPIEKTISKAKGQPREPQVYTLPPSREEMTKNQVSLTCLVKGFYPSDIAVEWESNGQPENNYKTTPPVLDSDGSFFLYSKLTVDKSRWQQGNVFSCSVMHEALHNHYTQKSLSLSPGK

SEQ ID NO: 30 - protein, 480 aa, Artificial Sequence
  Synthetic peptide
DKTHTCPPCPAPELLGGPSVFLFPPKPKDTLMISRTPEVTCVVVDVSHEDPEVKFNWYVDGVEVHNAKTKPREEQYGSTYRVVSVLTVLHQDWLNGKEYKCKVSNKALPAPIEKTISKAKGQPREPQVYTLPPSREEMTKNQVSLTCLVKGFYPSDIAVEWESNGQPENNYKTTPPVLDSDGSFFLYSKLTVDKSRWQQGNVFSCSVMHEALHNHYTQKSLSLSPGGGGSGGGGSGGGGSGGGGSGGGGSGGGGSDKTHTCPPCPAPELLGGPSVFLFPPKPKDTLMISRTPEVTCVVVDVSHEDPEVKFNWYVDGVEVHNAKTKPREEQYGSTYRVVSVLTVLHQDWLNGKEYKCKVSNKALPAPIEKTISKAKGQPREPQVYTLPPSREEMTKNQVSLTCLVKGFYPSDIAVEWESNGQPENNYKTTPPVLDSDGSFFLYSKLTVDKSRWQQGNVFSCSVMHEALHNHYTQKSLSLSP

SEQ ID NO: 31 - protein, 484 aa, Artificial Sequence
  Synthetic peptide
DKTHTCPPCPAPELLGGPSVFLFPPKPKDTLMISRTPEVTCVVVDVSHEDPEVKFNWYVDGVEVHNAKTKPCEEQYNSTYRCVSVLTVLHQDWLNGKEYKCKVSNKALPAPIEKTISKAKGQPREPQVYTLPPSREEMTKNQVSLTCLVKGFYPSDIAVEWESNGQPENNYKTTPPVLDSDGSFFLYSKLTVDKSRWQQGNVFSCSVMHEALHNHYTQKSLSLSPGKGGGGSGGGGSGGGGSGGGGSGGGGSGGGGSDKTHTCPPCPAPELLGGPSVFLFPPKPKDTLMISRTPEVTCVVVDVSHEDPEVKFNWYVDGVEVHNAKTKPCEEQYNSTYRCVSVLTVLHQDWLNGKEYKCKVSNKALPAPIEKTISKAKGQPREPQVYTLPPSREEMTKNQVSLTCLVKGFYPSDIAVEWESNGQPENNYKTTPPVLDSDGSFFLYSKLTVDKSRWQQGNVFSCSVMHEALHNHYTQKSLSLSPGK

SEQ ID NO: 32 - protein, 480 aa, Artificial Sequence
  Synthetic peptide
DKTHTCPPCPAPELLGGPSVFLFPPKPKDTLMISRTPEVTCVVVDVSHEDPEVKFNWYVDGVEVHNAKTKPCEEQYNSTYRCVSVLTVLHQDWLNGKEYKCKVSNKALPAPIEKTISKAKGQPREPQVYTLPPSREEMTKNQVSLTCLVKGFYPSDIAVEWESNGQPENNYKTTPPVLDSDGSFFLYSKLTVDKSRWQQGNVFSCSVMHEALHNHYTQKSLSLSPGGGGSGGGGSGGGGSGGGGSGGGGSGGGGSDKTHTCPPCPAPELLGGPSVFLFPPKPKDTLMISRTPEVTCVVVDVSHEDPEVKFNWYVDGVEVHNAKTKPCEEQYNSTYRCVSVLTVLHQDWLNGKEYKCKVSNKALPAPIEKTISKAKGQPREPQVYTLPPSREEMTKNQVSLTCLVKGFYPSDIAVEWESNGQPENNYKTTPPVLDSDGSFFLYSKLTVDKSRWQQGNVFSCSVMHEALHNHYTQKSLSLSP

SEQ ID NO: 33 - protein, 725 aa, Artificial Sequence
  Synthetic peptide
QVQLVESGGGLVKPGGSLRLSCAASGFTFSDYYMTWIRQAPGKGLEWLSYISSSGSTIYYADSVKGRFTISRDNAKNSLFLQMNSLRAEDTAVYYCARDRNSHFDYWGQGTLVTVSSGGGGSGGGGSGGGGSDIQMTQSPSSVSASVGDRVTITCRASQGINTWLAWYQQKPGKAPKLLIYGASGLQSGVPSRFSGSGSGTDFTLTISSLQPEDFATYYCQQAKSFPRTFGQGTKVEIKSGGGGSEVQLVESGGGLVQPGGSLKLSCAASGFTFNKYAMNWVRQAPGKGLEWVARIRSKYNNYATYYADSVKDRFTISRDDSKNTAYLQMNNLKTEDTAVYYCVRHGNFGNSYISYWAYWGQGTLVTVSSGGGGSGGGGSGGGGSQTVVTQEPSLTVSPGGTVTLTCGSSTGAVTSGNYPNWVQQKPGQAPRGLIGGTKFLAPGTPARFSGSLLGGKAALTLSGVQPEDEAEYYCVLWYSNRWVFGGGTKLTVLGGGGDKTHTCPPCPAPELLGGPSVFLFPPKPKDTLMISRTPEVTCVVVDVSHEDPEVKFNWYVDGVEVHNAKTKPCEEQYGSTYRCVSVLTVLHQDWLNGKEYKCKVSNKALPAPIEKTISKAKGQPREPQVYTLPPSRKEMTKNQVSLTCLVKGFYPSDIAVEWESNGQPENNYKTTPPVLKSDGSFFLYSKLTVDKSRWQQGNVFSCSVMHEALHNHYTQKSLSLSPGK

SEQ ID NO: 34 - protein, 227 aa, Artificial Sequence
  Synthetic peptide
DKTHTCPPCPAPELLGGPSVFLFPPKPKDTLMISRTPEVTCVVVDVSHEDPEVKFNWYVDGVEVHNAKTKPCEEQYGSTYRCVSVLTVLHQDWLNGKEYKCKVSNKALPAPIEKTISKAKGQPREPQVYTLPPSREEMTKNQVSLTCLVKGFYPSDIAVEWESNGQPENNYDTTPPVLDSDGSFFLYSDLTVDKSRWQQGNVFSCSVMHEALHNHYTQKSLSLSPGK

SEQ ID NO: 35 - protein, 1091 aa, Artificial Sequence
  Synthetic peptide
QVQLVESGGGLVKPGGSLRLSCAASGFTFSDYYMTWIRQAPGKGLEWLSYISSSGSTIYYADSVKGRFTISRDNAKNSLFLQMNSLRAEDTAVYYCARDRNSHFDYWGQGTLVTVSSGGGGSGGGGSGGGGSDIQMTQSPSSVSASVGDRVTITCRASQGINTWLAWYQQKPGKAPKLLIYGASGLQSGVPSRFSGSGSGTDFTLTISSLQPEDFATYYCQQAKSFPRTFGQGTKVEIKSGGGGSEVQLVESGGGLVQPGGSLKLSCAASGFTFNKYAMNWVRQAPGKGLEWVARIRSKYNNYATYYADSVKDRFTISRDDSKNTAYLQMNNLKTEDTAVYYCVRHGNFGNSYISYWAYWGQGTLVTVSSGGGGSGGGGSGGGGSQTVVTQEPSLTVSPGGTVTLTCGSSTGAVTSGNYPNWVQQKPGQAPRGLIGGTKFLAPGTPARFSGSLLGGKAALTLSGVQPEDEAEYYCVLWYSNRWVFGGGTKLTVLPGGDGSDAHKSEVAHRFKDLGEENFKALVLIAFAQYLQQCPFEDHVKLVNEVTEFAKTCVADESAENCDKSLHTLFGDKLCTVATLRETYGEMADCCAKQEPERNECFLQHKDDNPNLPRLVRPEVDVMCTAFHDNEETFLKKYLYEIARRHPYFYAPELLFFAKRYKAAFTECCQAADKAACLLPKLDELRDEGKASSAKQRLKCASLQKFGERAFKAWAVARLSQRFPKAEFAEVSKLVTDLTKVHTECCHGDLLECADDRADLAKYICENQDSISSKLKECCEKPLLEKSHCIAEVENDEMPADLPSLAADFVESKDVCKNYAEAKDVFLGMFLYEYARRHPDYSVVLLLRLAKTYETTLEKCCAAADPHECYAKVFDEFKPLVEEPQNLIKQNCELFEQLGEYKFQNALLVRYTKKVPQVSTPTLVEVSRNLGKVGSKCCKHPEAKRMPCAEDYLSVVLNQLCVLHEKTPVSDRVTKCCTESLVNRRPCFSALEVDETYVPKEFNAETFTFHADICTLSEKERQIKKQTALVELVKHKPKATKEQLKAVMDDFAAFVEKCCKADDKETCFAEEGKKLVAASQAALGLHHHHHH

SEQ ID NO: 36 - protein, 571 aa, Artificial Sequence
  Synthetic peptide
EVQLVESGGGLVQPGGSLKLSCAASGFTFNKYAMNWVRQAPGKGLEWVARIRSKYNNYATYYADSVKDRFTISRDDSKNTAYLQMNNLKTEDTAVYYCVRHGNFGNSYISYWAYWGQGTLVTVSSGGGGSGGGGSSYELTQPPSVSVSPGQTASITCSGDRLGEKYTSWYQQRPGQSPLLVIYQDTKRPSGIPERFSGSNSGNTATLTISGTQAMDEADYYCQAWESSTVVFGGGTKLTVLASTKGPSVFPLAPSSKSTSGGTAALGCLVKDYFPEPVTVSWNSGALTSGVHTFPAVLQSSGLYSLSSVVTVPSSSLGTQTYICNVNHKPSNTKVDKKVEPKSCDKTHTCPPCPAPELLGGPSVFLFPPKPKDTLMISRTPEVTCVVVDVSHEDPEVKFNWYVDGVEVHNAKTKPCEEQYGSTYRCVSVLTVLHQDWLNGKEYKCKVSNKALPAPIEKTISKAKGQPREPQVYTLPPSREEMTKNQVSLTCLVKGFYPSDIAVEWESNGQPENNYDTTPPVLDSDGSFFLYSDLTVDKSRWQQGNVFSCSVMHEALHNHYTQKSLSLSPGK

SEQ ID NO: 37 - protein, 577 aa, Artificial Sequence
  Synthetic peptide
QVQLVESGGGVVQPGGSLRLSCAASGFTFSSYGMHWVRQAPGKGLEWVAFIWYEGSNKYYAESVKDRFTISRDNSKNTLYLQMNSLRAEDTAVYYCARRAGIIGTIGYYYGMDVWGQGTTVTVSSGGGGSGGGGSQTVVTQEPSLTVSPGGTVTLTCGSSTGAVTSGNYPNWVQQKPGQAPRGLIGGTKFLAPGTPARFSGSLLGGKAALTLSGVQPEDEAEYYCVLWYSNRWVFGGGTKLTVLGQPKAAPSVTLFPPSSEELQANKATLVCLISDFYPGAVTVAWKADSSPVKAGVETTTPSKQSNNKYAASSYLSLTPEQWKSHRSYSCQVTHEGSTVEKTVAPTECSDKTHTCPPCPAPELLGGPSVFLFPPKPKDTLMISRTPEVTCVVVDVSHEDPEVKFNWYVDGVEVHNAKTKPCEEQYGSTYRCVSVLTVLHQDWLNGKEYKCKVSNKALPAPIEKTISKAKGQPREPQVYTLPPSRKEMTKNQVSLTCLVKGFYPSDIAVEWESNGQPENNYKTTPPVLKSDGSFFLYSKLTVDKSRWQQGNVFSCSVMHEALHNHYTQKSLSLSPGK

SEQ ID NO: 38 - protein, 732 aa, Artificial Sequence
  Synthetic peptide
QVQLVESGGGVVQPGGSLRLSCAASGFTFSSYGMHWVRQAPGKGLEWVAFIWYEGSNKYYAESVKDRFTISRDNSKNTLYLQMNSLRAEDTAVYYCARRAGIIGTIGYYYGMDVWGQGTTVTVSSGGGGSGGGGSGGGGSSYELTQPPSVSVSPGQTASITCSGDRLGEKYTSWYQQRPGQSPLLVIYQDTKRPSGIPERFSGSNSGNTATLTISGTQAMDEADYYCQAWESSTVVFGGGTKLTVLSGGGGSEVQLVESGGGLVQPGGSLKLSCAASGFTFNKYAMNWVRQAPGKGLEWVARIRSKYNNYATYYADSVKDRFTISRDDSKNTAYLQMNNLKTEDTAVYYCVRHGNFGNSYISYWAYWGQGTLVTVSSGGGGSGGGGSGGGGSQTVVTQEPSLTVSPGGTVTLTCGSSTGAVTSGNYPNWVQQKPGQAPRGLIGGTKFLAPGTPARFSGSLLGGKAALTLSGVQPEDEAEYYCVLWYSNRWVFGGGTKLTVLGGGGDKTHTCPPCPAPELLGGPSVFLFPPKPKDTLMISRTPEVTCVVVDVSHEDPEVKFNWYVDGVEVHNAKTKPCEEQYGSTYRCVSVLTVLHQDWLNGKEYKCKVSNKALPAPIEKTISKAKGQPREPQVYTLPPSRKEMTKNQVSLTCLVKGFYPSDIAVEWESNGQPENNYKTTPPVLKSDGSFFLYSKLTVDKSRWQQGNVFSCSVMHEALHNHYTQKSLSLSPGK

SEQ ID NO: 39 - protein, 227 aa, Artificial Sequence; identical to SEQ ID NO: 34
  Synthetic peptide

SEQ ID NO: 40 - protein, 736 aa, Artificial Sequence
  Synthetic peptide
QVQLVQSGAEVKKPGESVKVSCKASGYTFTNYGMNWVKQAPGQCLEWMGWINTYTGEPTYADKFQGRVTMTTDTSTSTAYMEIRNLGGDDTAVYYCARWSWSDGYYVYFDYWGQGTSVTVSSGGGGSGGGGSGGGGSDIVMTQSPDSLTVSLGERTTINCKSSQSVLDSSTNKNSLAWYQQKPGQPPKLLLSWASTRESGIPDRFSGSGSGTDFTLTIDSPQPEDSATYYCQQSAHFPITFGCGTRLEIKSGGGGSEVQLVESGGGLVQPGGSLKLSCAASGFTFNKYAMNWVRQAPGKGLEWVARIRSKYNNYATYYADSVKDRFTISRDDSKNTAYLQMNNLKTEDTAVYYCVRHGNFGNSYISYWAYWGQGTLVTVSSGGGGSGGGGSGGGGSQTVVTQEPSLTVSPGGTVTLTCGSSTGAVTSGNYPNWVQQKPGQAPRGLIGGTKFLAPGTPARFSGSLLGGKAALTLSGVQPEDEAEYYCVLWYSNRWVFGGGTKLTVLGGGGDKTHTCPPCPAPELLGGPSVFLFPPKPKDTLMISRTPEVTCVVVDVSHEDPEVKFNWYVDGVEVHNAKTKPCEEQYGSTYRCVSVLTVLHQDWLNGKEYKCKVSNKALPAPIEKTISKAKGQPREPQVYTLPPSRKEMTKNQVSLTCLVKGFYPSDIAVEWESNGQPENNYKTTPPVLKSDGSFFLYSKLTVDKSRWQQGNVFSCSVMHEALHNHYTQKSLSLSPGK

SEQ ID NO: 41 - protein, 227 aa, Artificial Sequence; identical to SEQ ID NO: 34
  Synthetic peptide

SEQ ID NO: 42 - protein, 5 aa, Artificial Sequence
  Synthetic peptide
DYYMN

SEQ ID NO: 43 - protein, 17 aa, Artificial Sequence
  Synthetic peptide
IISDGGYYTYYSDIIKG

SEQ ID NO: 44 - protein, 12 aa, Artificial Sequence
  Synthetic peptide
GFPLLRHGAMDY

SEQ ID NO: 45 - protein, 11 aa, Artificial Sequence
  Synthetic peptide
KASQNVDTNVA

SEQ ID NO: 46 - protein, 7 aa, Artificial Sequence
  Synthetic peptide
SASYRYS

SEQ ID NO: 47 - protein, 9 aa, Artificial Sequence
  Synthetic peptide
QQYDSYPYT

SEQ ID NO: 48 - protein, 121 aa, Artificial Sequence
  Synthetic peptide
QVQLVESGGGLVKPGESLRLSCAASGFTFSDYYMNWVRQAPGKGLEWVAIISDGGYYTYYSDIIKGRFTISRDNAKNSLYLQMNSLKAEDTAVYYCARGFPLLRHGAMDYWGQGTLVTVSS

SEQ ID NO: 49 - protein, 107 aa, Artificial Sequence
  Synthetic peptide
DIQMTQSPSSLSASVGDRVTITCKASQNVDTNVAWYQQKPGQAPKSLIYSASYRYSDVPSRFSGSASGTDFTLTISSLQSEDFATYYCQQYDSYPYTFGGGTKLEIK

SEQ ID NO: 50 - protein, 243 aa, Artificial Sequence
  Synthetic peptide
QVQLVESGGGLVKPGESLRLSCAASGFTFSDYYMNWVRQAPGKGLEWVAIISDGGYYTYYSDIIKGRFTISRDNAKNSLYLQMNSLKAEDTAVYYCARGFPLLRHGAMDYWGQGTLVTVSSGGGGSGGGGSGGGGSDIQMTQSPSSLSASVGDRVTITCKASQNVDTNVAWYQQKPGQAPKSLIYSASYRYSDVPSRFSGSASGTDFTLTISSLQSEDFATYYCQQYDSYPYTFGGGTKLEIK

SEQ ID NO: 51 - protein, 498 aa, Artificial Sequence
  Synthetic peptide
QVQLVESGGGLVKPGESLRLSCAASGFTFSDYYMNWVRQAPGKGLEWVAIISDGGYYTYYSDIIKGRFTISRDNAKNSLYLQMNSLKAEDTAVYYCARGFPLLRHGAMDYWGQGTLVTVSSGGGGSGGGGSGGGGSDIQMTQSPSSLSASVGDRVTITCKASQNVDTNVAWYQQKPGQAPKSLIYSASYRYSDVPSRFSGSASGTDFTLTISSLQSEDFATYYCQQYDSYPYTFGGGTKLEIKSGGGGSEVQLVESGGGLVQPGGSLKLSCAASGFTFNKYAMNWVRQAPGKGLEWVARIRSKYNNYATYYADSVKDRFTISRDDSKNTAYLQMNNLKTEDTAVYYCVRHGNFGNSYISYWAYWGQGTLVTVSSGGGGSGGGGSGGGGSQTVVTQEPSLTVSPGGTVTLTCGSSTGAVTSGNYPNWVQQKPGQAPRGLIGGTKFLAPGTPARFSGSLLGGKAALTLSGVQPEDEAEYYCVLWYSNRWVFGGGTKLTVL

SEQ ID NO: 52 - protein, 986 aa, Artificial Sequence
  Synthetic peptide
QVQLVESGGGLVKPGESLRLSCAASGFTFSDYYMNWVRQAPGKGLEWVAIISDGGYYTYYSDIIKGRFTISRDNAKNSLYLQMNSLKAEDTAVYYCARGFPLLRHGAMDYWGQGTLVTVSSGGGGSGGGGSGGGGSDIQMTQSPSSLSASVGDRVTITCKASQNVDTNVAWYQQKPGQAPKSLIYSASYRYSDVPSRFSGSASGTDFTLTISSLQSEDFATYYCQQYDSYPYTFGGGTKLEIKSGGGGSEVQLVESGGGLVQPGGSLKLSCAASGFTFNKYAMNWVRQAPGKGLEWVARIRSKYNNYATYYADSVKDRFTISRDDSKNTAYLQMNNLKTEDTAVYYCVRHGNFGNSYISYWAYWGQGTLVTVSSGGGGSGGGGSGGGGSQTVVTQEPSLTVSPGGTVTLTCGSSTGAVTSGNYPNWVQQKPGQAPRGLIGGTKFLAPGTPARFSGSLLGGKAALTLSGVQPEDEAEYYCVLWYSNRWVFGGGTKLTVLGGGGDKTHTCPPCPAPELLGGPSVFLFPPKPKDTLMISRTPEVTCVVVDVSHEDPEVKFNWYVDGVEVHNAKTKPCEEQYGSTYRCVSVLTVLHQDWLNGKEYKCKVSNKALPAPIEKTISKAKGQPREPQVYTLPPSREEMTKNQVSLTCLVKGFYPSDIAVEWESNGQPENNYKTTPPVLDSDGSFFLYSKLTVDKSRWQQGNVFSCSVMHEALHNHYTQKSLSLSPGKGGGGSGGGGSGGGGSGGGGSGGGGSGGGGSDKTHTCPPCPAPELLGGPSVFLFPPKPKDTLMISRTPEVTCVVVDVSHEDPEVKFNWYVDGVEVHNAKTKPCEEQYGSTYRCVSVLTVLHQDWLNGKEYKCKVSNKALPAPIEKTISKAKGQPREPQVYTLPPSREEMTKNQVSLTCLVKGFYPSDIAVEWESNGQPENNYKTTPPVLDSDGSFFLYSKLTVDKSRWQQGNVFSCSVMHEALHNHYTQKSLSLSPGK

SEQ ID NO: 53 - protein, 984 aa, Artificial Sequence
  Synthetic peptide
QVQLVESGGGLVKPGESLRLSCAASGFTFSDYYMNWVRQAPGKGLEWVAIISDGGYYTYYSDIIKGRFTISRDNAKNSLYLQMNSLKAEDTAVYYCARGFPLLRHGAMDYWGQGTLVTVSSGGGGSGGGGSGGGGSDIQMTQSPSSLSASVGDRVTITCKASQNVDTNVAWYQQKPGQAPKSLIYSASYRYSDVPSRFSGSASGTDFTLTISSLQSEDFATYYCQQYDSYPYTFGGGTKLEIKSGGGGSEVQLVESGGGLVQPGGSLKLSCAASGFTFNKYAMNWVRQAPGKGLEWVARIRSKYNNYATYYADSVKDRFTISRDDSKNTAYLQMNNLKTEDTAVYYCVRHGNFGNSYISYWAYWGQGTLVTVSSGGGGSGGGGSGGGGSQTVVTQEPSLTVSPGGTVTLTCGSSTGAVTSGNYPNWVQQKPGQAPRGLIGGTKFLAPGTPARFSGSLLGGKAALTLSGVQPEDEAEYYCVLWYSNRWVFGGGTKLTVLGGGGDKTHTCPPCPAPELLGGPSVFLFPPKPKDTLMISRTPEVTCVVVDVSHEDPEVKFNWYVDGVEVHNAKTKPCEEQYGSTYRCVSVLTVLHQDWLNGKEYKCKVSNKALPAPIEKTISKAKGQPREPQVYTLPPSREEMTKNQVSLTCLVKGFYPSDIAVEWESNGQPENNYKTTPPVLDSDGSFFLYSKLTVDKSRWQQGNVFSCSVMHEALHNHYTQKSLSLSPGGGGSGGGGSGGGGSGGGGSGGGGSGGGGSDKTHTCPPCPAPELLGGPSVFLFPPKPKDTLMISRTPEVTCVVVDVSHEDPEVKFNWYVDGVEVHNAKTKPCEEQYGSTYRCVSVLTVLHQDWLNGKEYKCKVSNKALPAPIEKTISKAKGQPREPQVYTLPPSREEMTKNQVSLTCLVKGFYPSDIAVEWESNGQPENNYKTTPPVLDSDGSFFLYSKLTVDKSRWQQGNVFSCSVMHEALHNHYTQKSLSLSPGK

SEQ ID NO: 54 - protein, 121 aa, Artificial Sequence
  Synthetic peptide
QVQLVESGGGLVKPGESLRLSCAASGFTFSDYYMNWVRQAPGKCLEWVAIISDGGYYTYYSDIIKGRFTISRDNAKNSLYLQMNSLKAEDTAVYYCARGFPLLRHGAMDYWGQGTLVTVSS

SEQ ID NO: 55 - protein, 107 aa, Artificial Sequence
  Synthetic peptide
DIQMTQSPSSLSASVGDRVTITCKASQNVDTNVAWYQQKPGQAPKSLIYSASYRYSDVPSRFSGSASGTDFTLTISSLQSEDFATYYCQQYDSYPYTFGCGTKLEIK

SEQ ID NO: 56 - protein, 243 aa, Artificial Sequence
  Synthetic peptide
QVQLVESGGGLVKPGESLRLSCAASGFTFSDYYMNWVRQAPGKCLEWVAIISDGGYYTYYSDIIKGRFTISRDNAKNSLYLQMNSLKAEDTAVYYCARGFPLLRHGAMDYWGQGTLVTVSSGGGGSGGGGSGGGGSDIQMTQSPSSLSASVGDRVTITCKASQNVDTNVAWYQQKPGQAPKSLIYSASYRYSDVPSRFSGSASGTDFTLTISSLQSEDFATYYCQQYDSYPYTFGCGTKLEIK

SEQ ID NO: 57 - protein, 498 aa, Artificial Sequence
  Synthetic peptide
QVQLVESGGGLVKPGESLRLSCAASGFTFSDYYMNWVRQAPGKCLEWVAIISDGGYYTYYSDIIKGRFTISRDNAKNSLYLQMNSLKAEDTAVYYCARGFPLLRHGAMDYWGQGTLVTVSSGGGGSGGGGSGGGGSDIQMTQSPSSLSASVGDRVTITCKASQNVDTNVAWYQQKPGQAPKSLIYSASYRYSDVPSRFSGSASGTDFTLTISSLQSEDFATYYCQQYDSYPYTFGCGTKLEIKSGGGGSEVQLVESGGGLVQPGGSLKLSCAASGFTFNKYAMNWVRQAPGKGLEWVARIRSKYNNYATYYADSVKDRFTISRDDSKNTAYLQMNNLKTEDTAVYYCVRHGNFGNSYISYWAYWGQGTLVTVSSGGGGSGGGGSGGGGSQTVVTQEPSLTVSPGGTVTLTCGSSTGAVTSGNYPNWVQQKPGQAPRGLIGGTKFLAPGTPARFSGSLLGGKAALTLSGVQPEDEAEYYCVLWYSNRWVFGGGTKLTVL

SEQ ID NO: 58 - protein, 986 aa, Artificial Sequence
  Synthetic peptide
QVQLVESGGGLVKPGESLRLSCAASGFTFSDYYMNWVRQAPGKCLEWVAIISDGGYYTYYSDIIKGRFTISRDNAKNSLYLQMNSLKAEDTAVYYCARGFPLLRHGAMDYWGQGTLVTVSSGGGGSGGGGSGGGGSDIQMTQSPSSLSASVGDRVTITCKASQNVDTNVAWYQQKPGQAPKSLIYSASYRYSDVPSRFSGSASGTDFTLTISSLQSEDFATYYCQQYDSYPYTFGCGTKLEIKSGGGGSEVQLVESGGGLVQPGGSLKLSCAASGFTFNKYAMNWVRQAPGKGLEWVARIRSKYNNYATYYADSVKDRFTISRDDSKNTAYLQMNNLKTEDTAVYYCVRHGNFGNSYISYWAYWGQGTLVTVSSGGGGSGGGGSGGGGSQTVVTQEPSLTVSPGGTVTLTCGSSTGAVTSGNYPNWVQQKPGQAPRGLIGGTKFLAPGTPARFSGSLLGGKAALTLSGVQPEDEAEYYCVLWYSNRWVFGGGTKLTVLGGGGDKTHTCPPCPAPELLGGPSVFLFPPKPKDTLMISRTPEVTCVVVDVSHEDPEVKFNWYVDGVEVHNAKTKPCEEQYGSTYRCVSVLTVLHQDWLNGKEYKCKVSNKALPAPIEKTISKAKGQPREPQVYTLPPSREEMTKNQVSLTCLVKGFYPSDIAVEWESNGQPENNYKTTPPVLDSDGSFFLYSKLTVDKSRWQQGNVFSCSVMHEALHNHYTQKSLSLSPGKGGGGSGGGGSGGGGSGGGGSGGGGSGGGGSDKTHTCPPCPAPELLGGPSVFLFPPKPKDTLMISRTPEVTCVVVDVSHEDPEVKFNWYVDGVEVHNAKTKPCEEQYGSTYRCVSVLTVLHQDWLNGKEYKCKVSNKALPAPIEKTISKAKGQPREPQVYTLPPSREEMTKNQVSLTCLVKGFYPSDIAVEWESNGQPENNYKTTPPVLDSDGSFFLYSKLTVDKSRWQQGNVFSCSVMHEALHNHYTQKSLSLSPGK

SEQ ID NO: 59 - protein, 984 aa, Artificial Sequence
  Synthetic peptide
QVQLVESGGGLVKPGESLRLSCAASGFTFSDYYMNWVRQAPGKCLEWVAIISDGGYYTYYSDIIKGRFTISRDNAKNSLYLQMNSLKAEDTAVYYCARGFPLLRHGAMDYWGQGTLVTVSSGGGGSGGGGSGGGGSDIQMTQSPSSLSASVGDRVTITCKASQNVDTNVAWYQQKPGQAPKSLIYSASYRYSDVPSRFSGSASGTDFTLTISSLQSEDFATYYCQQYDSYPYTFGCGTKLEIKSGGGGSEVQLVESGGGLVQPGGSLKLSCAASGFTFNKYAMNWVRQAPGKGLEWVARIRSKYNNYATYYADSVKDRFTISRDDSKNTAYLQMNNLKTEDTAVYYCVRHGNFGNSYISYWAYWGQGTLVTVSSGGGGSGGGGSGGGGSQTVVTQEPSLTVSPGGTVTLTCGSSTGAVTSGNYPNWVQQKPGQAPRGLIGGTKFLAPGTPARFSGSLLGGKAALTLSGVQPEDEAEYYCVLWYSNRWVFGGGTKLTVLGGGGDKTHTCPPCPAPELLGGPSVFLFPPKPKDTLMISRTPEVTCVVVDVSHEDPEVKFNWYVDGVEVHNAKTKPCEEQYGSTYRCVSVLTVLHQDWLNGKEYKCKVSNKALPAPIEKTISKAKGQPREPQVYTLPPSREEMTKNQVSLTCLVKGFYPSDIAVEWESNGQPENNYKTTPPVLDSDGSFFLYSKLTVDKSRWQQGNVFSCSVMHEALHNHYTQKSLSLSPGGGGSGGGGSGGGGSGGGGSGGGGSGGGGSDKTHTCPPCPAPELLGGPSVFLFPPKPKDTLMISRTPEVTCVVVDVSHEDPEVKFNWYVDGVEVHNAKTKPCEEQYGSTYRCVSVLTVLHQDWLNGKEYKCKVSNKALPAPIEKTISKAKGQPREPQVYTLPPSREEMTKNQVSLTCLVKGFYPSDIAVEWESNGQPENNYKTTPPVLDSDGSFFLYSKLTVDKSRWQQGNVFSCSVMHEALHNHYTQKSLSLSPGK

SEQ ID NO: 60 - protein, 5 aa, Artificial Sequence
  Synthetic peptide
DYYMY

SEQ ID NO: 61 - protein, 17 aa, Artificial Sequence
  Synthetic peptide
IISDAGGLTYYSDIIKG

SEQ ID NO: 62 - protein, 12 aa, Artificial Sequence
  Synthetic peptide
GFPLLRHGAMDY

SEQ ID NO: 63 - protein, 11 aa, Artificial Sequence
  Synthetic peptide
KASQNVDTNVA

SEQ ID NO: 64 - protein, 7 aa, Artificial Sequence
  Synthetic peptide
SASYRYS

SEQ ID NO: 65 - protein, 9 aa, Artificial Sequence
  Synthetic peptide
QQYDSYPYT

SEQ ID NO: 66 - protein, 121 aa, Artificial Sequence
  Synthetic peptide
QVQLVESGGGLVKPGESLRLSCAASGFTFSDYYMYWVRQAPGKGLEWVAIISDAGGLTYYSDIIKGRFTISRDNAKNSLYLQINSLKAEDTAVYYCARGFPLLRHGAMDYWGQGTLVTVSS

SEQ ID NO: 67 - protein, 107 aa, Artificial Sequence
  Synthetic peptide
DIQMTQSPSSLSASVGDRVTITCKASQNVDTNVAWYQQKPGQAPKSLIYSASYRYSDVPSRFSGSASGTDFTLTISSVQSEDFATYYCQQYDSYPYTFGGGTKLEIK

SEQ ID NO: 68 - protein, 243 aa, Artificial Sequence
  Synthetic peptide
QVQLVESGGGLVKPGESLRLSCAASGFTFSDYYMYWVRQAPGKGLEWVAIISDAGGLTYYSDIIKGRFTISRDNAKNSLYLQINSLKAEDTAVYYCARGFPLLRHGAMDYWGQGTLVTVSSGGGGSGGGGSGGGGSDIQMTQSPSSLSASVGDRVTITCKASQNVDTNVAWYQQKPGQAPKSLIYSASYRYSDVPSRFSGSASGTDFTLTISSVQSEDFATYYCQQYDSYPYTFGGGTKLEIK

SEQ ID NO: 69 - protein, 498 aa, Artificial Sequence
  Synthetic peptide
QVQLVESGGGLVKPGESLRLSCAASGFTFSDYYMYWVRQAPGKGLEWVAIISDAGGLTYYSDIIKGRFTISRDNAKNSLYLQINSLKAEDTAVYYCARGFPLLRHGAMDYWGQGTLVTVSSGGGGSGGGGSGGGGSDIQMTQSPSSLSASVGDRVTITCKASQNVDTNVAWYQQKPGQAPKSLIYSASYRYSDVPSRFSGSASGTDFTLTISSVQSEDFATYYCQQYDSYPYTFGGGTKLEIKSGGGGSEVQLVESGGGLVQPGGSLKLSCAASGFTFNKYAMNWVRQAPGKGLEWVARIRSKYNNYATYYADSVKDRFTISRDDSKNTAYLQMNNLKTEDTAVYYCVRHGNFGNSYISYWAYWGQGTLVTVSSGGGGSGGGGSGGGGSQTVVTQEPSLTVSPGGTVTLTCGSSTGAVTSGNYPNWVQQKPGQAPRGLIGGTKFLAPGTPARFSGSLLGGKAALTLSGVQPEDEAEYYCVLWYSNRWVFGGGTKLTVL

SEQ ID NO: 70 - protein, 986 aa, Artificial Sequence
  Synthetic peptide
QVQLVESGGGLVKPGESLRLSCAASGFTFSDYYMYWVRQAPGKGLEWVAIISDAGGLTYYSDIIKGRFTISRDNAKNSLYLQINSLKAEDTAVYYCARGFPLLRHGAMDYWGQGTLVTVSSGGGGSGGGGSGGGGSDIQMTQSPSSLSASVGDRVTITCKASQNVDTNVAWYQQKPGQAPKSLIYSASYRYSDVPSRFSGSASGTDFTLTISSVQSEDFATYYCQQYDSYPYTFGGGTKLEIKSGGGGSEVQLVESGGGLVQPGGSLKLSCAASGFTFNKYAMNWVRQAPGKGLEWVARIRSKYNNYATYYADSVKDRFTISRDDSKNTAYLQMNNLKTEDTAVYYCVRHGNFGNSYISYWAYWGQGTLVTVSSGGGGSGGGGSGGGGSQTVVTQEPSLTVSPGGTVTLTCGSSTGAVTSGNYPNWVQQKPGQAPRGLIGGTKFLAPGTPARFSGSLLGGKAALTLSGVQPEDEAEYYCVLWYSNRWVFGGGTKLTVLGGGGDKTHTCPPCPAPELLGGPSVFLFPPKPKDTLMISRTPEVTCVVVDVSHEDPEVKFNWYVDGVEVHNAKTKPCEEQYGSTYRCVSVLTVLHQDWLNGKEYKCKVSNKALPAPIEKTISKAKGQPREPQVYTLPPSREEMTKNQVSLTCLVKGFYPSDIAVEWESNGQPENNYKTTPPVLDSDGSFFLYSKLTVDKSRWQQGNVFSCSVMHEALHNHYTQKSLSLSPGKGGGGSGGGGSGGGGSGGGGSGGGGSGGGGSDKTHTCPPCPAPELLGGPSVFLFPPKPKDTLMISRTPEVTCVVVDVSHEDPEVKFNWYVDGVEVHNAKTKPCEEQYGSTYRCVSVLTVLHQDWLNGKEYKCKVSNKALPAPIEKTISKAKGQPREPQVYTLPPSREEMTKNQVSLTCLVKGFYPSDIAVEWESNGQPENNYKTTPPVLDSDGSFFLYSKLTVDKSRWQQGNVFSCSVMHEALHNHYTQKSLSLSPGK

SEQ ID NO: 71 - protein, 984 aa, Artificial Sequence
  Synthetic peptide
QVQLVESGGGLVKPGESLRLSCAASGFTFSDYYMYWVRQAPGKGLEWVAIISDAGGLTYYSDIIKGRFTISRDNAKNSLYLQINSLKAEDTAVYYCARGFPLLRHGAMDYWGQGTLVTVSSGGGGSGGGGSGGGGSDIQMTQSPSSLSASVGDRVTITCKASQNVDTNVAWYQQKPGQAPKSLIYSASYRYSDVPSRFSGSASGTDFTLTISSVQSEDFATYYCQQYDSYPYTFGGGTKLEIKSGGGGSEVQLVESGGGLVQPGGSLKLSCAASGFTFNKYAMNWVRQAPGKGLEWVARIRSKYNNYATYYADSVKDRFTISRDDSKNTAYLQMNNLKTEDTAVYYCVRHGNFGNSYISYWAYWGQGTLVTVSSGGGGSGGGGSGGGGSQTVVTQEPSLTVSPGGTVTLTCGSSTGAVTSGNYPNWVQQKPGQAPRGLIGGTKFLAPGTPARFSGSLLGGKAALTLSGVQPEDEAEYYCVLWYSNRWVFGGGTKLTVLGGGGDKTHTCPPCPAPELLGGPSVFLFPPKPKDTLMISRTPEVTCVVVDVSHEDPEVKFNWYVDGVEVHNAKTKPCEEQYGSTYRCVSVLTVLHQDWLNGKEYKCKVSNKALPAPIEKTISKAKGQPREPQVYTLPPSREEMTKNQVSLTCLVKGFYPSDIAVEWESNGQPENNYKTTPPVLDSDGSFFLYSKLTVDKSRWQQGNVFSCSVMHEALHNHYTQKSLSLSPGGGGSGGGGSGGGGSGGGGSGGGGSGGGGSDKTHTCPPCPAPELLGGPSVFLFPPKPKDTLMISRTPEVTCVVVDVSHEDPEVKFNWYVDGVEVHNAKTKPCEEQYGSTYRCVSVLTVLHQDWLNGKEYKCKVSNKALPAPIEKTISKAKGQPREPQVYTLPPSREEMTKNQVSLTCLVKGFYPSDIAVEWESNGQPENNYKTTPPVLDSDGSFFLYSKLTVDKSRWQQGNVFSCSVMHEALHNHYTQKSLSLSPGK

SEQ ID NO: 72 - protein, 121 aa, Artificial Sequence
  Synthetic peptide
QVQLVESGGGLVKPGESLRLSCAASGFTFSDYYMYWVRQAPGKCLEWVAIISDAGGLTYYSDIIKGRFTISRDNAKNSLYLQINSLKAEDTAVYYCARGFPLLRHGAMDYWGQGTLVTVSS

SEQ ID NO: 73 - protein, 107 aa, Artificial Sequence
  Synthetic peptide
DIQMTQSPSSLSASVGDRVTITCKASQNVDTNVAWYQQKPGQAPKSLIYSASYRYSDVPSRFSGSASGTDFTLTISSVQSEDFATYYCQQYDSYPYTFGCGTKLEIK

SEQ ID NO: 74 - protein, 243 aa, Artificial Sequence
  Synthetic peptide
QVQLVESGGGLVKPGESLRLSCAASGFTFSDYYMYWVRQAPGKCLEWVAIISDAGGLTYYSDIIKGRFTISRDNAKNSLYLQINSLKAEDTAVYYCARGFPLLRHGAMDYWGQGTLVTVSSGGGGSGGGGSGGGGSDIQMTQSPSSLSASVGDRVTITCKASQNVDTNVAWYQQKPGQAPKSLIYSASYRYSDVPSRFSGSASGTDFTLTISSVQSEDFATYYCQQYDSYPYTFGCGTKLEIK

SEQ ID NO: 75 - protein, 498 aa, Artificial Sequence
  Synthetic peptide
QVQLVESGGGLVKPGESLRLSCAASGFTFSDYYMYWVRQAPGKCLEWVAIISDAGGLTYYSDIIKGRFTISRDNAKNSLYLQINSLKAEDTAVYYCARGFPLLRHGAMDYWGQGTLVTVSSGGGGSGGGGSGGGGSDIQMTQSPSSLSASVGDRVTITCKASQNVDTNVAWYQQKPGQAPKSLIYSASYRYSDVPSRFSGSASGTDFTLTISSVQSEDFATYYCQQYDSYPYTFGCGTKLEIKSGGGGSEVQLVESGGGLVQPGGSLKLSCAASGFTFNKYAMNWVRQAPGKGLEWVARIRSKYNNYATYYADSVKDRFTISRDDSKNTAYLQMNNLKTEDTAVYYCVRHGNFGNSYISYWAYWGQGTLVTVSSGGGGSGGGGSGGGGSQTVVTQEPSLTVSPGGTVTLTCGSSTGAVTSGNYPNWVQQKPGQAPRGLIGGTKFLAPGTPARFSGSLLGGKAALTLSGVQPEDEAEYYCVLWYSNRWVFGGGTKLTVL

SEQ ID NO: 76 - protein, 986 aa, Artificial Sequence
  Synthetic peptide
QVQLVESGGGLVKPGESLRLSCAASGFTFSDYYMYWVRQAPGKCLEWVAIISDAGGLTYYSDIIKGRFTISRDNAKNSLYLQINSLKAEDTAVYYCARGFPLLRHGAMDYWGQGTLVTVSSGGGGSGGGGSGGGGSDIQMTQSPSSLSASVGDRVTITCKASQNVDTNVAWYQQKPGQAPKSLIYSASYRYSDVPSRFSGSASGTDFTLTISSVQSEDFATYYCQQYDSYPYTFGCGTKLEIKSGGGGSEVQLVESGGGLVQPGGSLKLSCAASGFTFNKYAMNWVRQAPGKGLEWVARIRSKYNNYATYYADSVKDRFTISRDDSKNTAYLQMNNLKTEDTAVYYCVRHGNFGNSYISYWAYWGQGTLVTVSSGGGGSGGGGSGGGGSQTVVTQEPSLTVSPGGTVTLTCGSSTGAVTSGNYPNWVQQKPGQAPRGLIGGTKFLAPGTPARFSGSLLGGKAALTLSGVQPEDEAEYYCVLWYSNRWVFGGGTKLTVLGGGGDKTHTCPPCPAPELLGGPSVFLFPPKPKDTLMISRTPEVTCVVVDVSHEDPEVKFNWYVDGVEVHNAKTKPCEEQYGSTYRCVSVLTVLHQDWLNGKEYKCKVSNKALPAPIEKTISKAKGQPREPQVYTLPPSREEMTKNQVSLTCLVKGFYPSDIAVEWESNGQPENNYKTTPPVLDSDGSFFLYSKLTVDKSRWQQGNVFSCSVMHEALHNHYTQKSLSLSPGKGGGGSGGGGSGGGGSGGGGSGGGGSGGGGSDKTHTCPPCPAPELLGGPSVFLFPPKPKDTLMISRTPEVTCVVVDVSHEDPEVKFNWYVDGVEVHNAKTKPCEEQYGSTYRCVSVLTVLHQDWLNGKEYKCKVSNKALPAPIEKTISKAKGQPREPQVYTLPPSREEMTKNQVSLTCLVKGFYPSDIAVEWESNGQPENNYKTTPPVLDSDGSFFLYSKLTVDKSRWQQGNVFSCSVMHEALHNHYTQKSLSLSPGK

SEQ ID NO: 77 - protein, 984 aa, Artificial Sequence
  Synthetic peptide
QVQLVESGGGLVKPGESLRLSCAASGFTFSDYYMYWVRQAPGKCLEWVAIISDAGGLTYYSDIIKGRFTISRDNAKNSLYLQINSLKAEDTAVYYCARGFPLLRHGAMDYWGQGTLVTVSSGGGGSGGGGSGGGGSDIQMTQSPSSLSASVGDRVTITCKASQNVDTNVAWYQQKPGQAPKSLIYSASYRYSDVPSRFSGSASGTDFTLTISSVQSEDFATYYCQQYDSYPYTFGCGTKLEIKSGGGGSEVQLVESGGGLVQPGGSLKLSCAASGFTFNKYAMNWVRQAPGKGLEWVARIRSKYNNYATYYADSVKDRFTISRDDSKNTAYLQMNNLKTEDTAVYYCVRHGNFGNSYISYWAYWGQGTLVTVSSGGGGSGGGGSGGGGSQTVVTQEPSLTVSPGGTVTLTCGSSTGAVTSGNYPNWVQQKPGQAPRGLIGGTKFLAPGTPARFSGSLLGGKAALTLSGVQPEDEAEYYCVLWYSNRWVFGGGTKLTVLGGGGDKTHTCPPCPAPELLGGPSVFLFPPKPKDTLMISRTPEVTCVVVDVSHEDPEVKFNWYVDGVEVHNAKTKPCEEQYGSTYRCVSVLTVLHQDWLNGKEYKCKVSNKALPAPIEKTISKAKGQPREPQVYTLPPSREEMTKNQVSLTCLVKGFYPSDIAVEWESNGQPENNYKTTPPVLDSDGSFFLYSKLTVDKSRWQQGNVFSCSVMHEALHNHYTQKSLSLSPGGGGSGGGGSGGGGSGGGGSGGGGSGGGGSDKTHTCPPCPAPELLGGPSVFLFPPKPKDTLMISRTPEVTCVVVDVSHEDPEVKFNWYVDGVEVHNAKTKPCEEQYGSTYRCVSVLTVLHQDWLNGKEYKCKVSNKALPAPIEKTISKAKGQPREPQVYTLPPSREEMTKNQVSLTCLVKGFYPSDIAVEWESNGQPENNYKTTPPVLDSDGSFFLYSKLTVDKSRWQQGNVFSCSVMHEALHNHYTQKSLSLSPGK

SEQ ID NO: 78 - protein, 5 aa, Artificial Sequence
  Synthetic peptide
DYYMY

SEQ ID NO: 79 - protein, 17 aa, Artificial Sequence
  Synthetic peptide
IISDAGGLTYYSDIIKG

SEQ ID NO: 80 - protein, 12 aa, Artificial Sequence
  Synthetic peptide
GFPLLRHGAMDY

SEQ ID NO: 81 - protein, 11 aa, Artificial Sequence
  Synthetic peptide
KASQNVDTNVA

SEQ ID NO: 82 - protein, 7 aa, Artificial Sequence
  Synthetic peptide
SASYRYS

SEQ ID NO: 83 - protein, 9 aa, Artificial Sequence
  Synthetic peptide
QQYDDLRPT

SEQ ID NO: 84 - protein, 121 aa, Artificial Sequence; identical to SEQ ID NO: 66
  Synthetic peptide

SEQ ID NO: 85 - protein, 107 aa, Artificial Sequence
  Synthetic peptide
DIQMTQSPSSLSASVGDRVTITCKASQNVDTNVAWYQQKPGQAPKSLIYSASYRYSDVPSRFSGSASGTDFTLTISSLQSEDFATYYCQQYDDLRPTFGGGTKLEIK

SEQ ID NO: 86 - protein, 243 aa, Artificial Sequence
  Synthetic peptide
QVQLVESGGGLVKPGESLRLSCAASGFTFSDYYMYWVRQAPGKGLEWVAIISDAGGLTYYSDIIKGRFTISRDNAKNSLYLQINSLKAEDTAVYYCARGFPLLRHGAMDYWGQGTLVTVSSGGGGSGGGGSGGGGSDIQMTQSPSSLSASVGDRVTITCKASQNVDTNVAWYQQKPGQAPKSLIYSASYRYSDVPSRFSGSASGTDFTLTISSLQSEDFATYYCQQYDDLRPTFGGGTKLEIK

SEQ ID NO: 87 - protein, 498 aa, Artificial Sequence
  Synthetic peptide
QVQLVESGGGLVKPGESLRLSCAASGFTFSDYYMYWVRQAPGKGLEWVAIISDAGGLTYYSDIIKGRFTISRDNAKNSLYLQINSLKAEDTAVYYCARGFPLLRHGAMDYWGQGTLVTVSSGGGGSGGGGSGGGGSDIQMTQSPSSLSASVGDRVTITCKASQNVDTNVAWYQQKPGQAPKSLIYSASYRYSDVPSRFSGSASGTDFTLTISSLQSEDFATYYCQQYDDLRPTFGGGTKLEIKSGGGGSEVQLVESGGGLVQPGGSLKLSCAASGFTFNKYAMNWVRQAPGKGLEWVARIRSKYNNYATYYADSVKDRFTISRDDSKNTAYLQMNNLKTEDTAVYYCVRHGNFGNSYISYWAYWGQGTLVTVSSGGGGSGGGGSGGGGSQTVVTQEPSLTVSPGGTVTLTCGSSTGAVTSGNYPNWVQQKPGQAPRGLIGGTKFLAPGTPARFSGSLLGGKAALTLSGVQPEDEAEYYCVLWYSNRWVFGGGTKLTVL

SEQ ID NO: 88 - protein, 986 aa, Artificial Sequence
  Synthetic peptide
QVQLVESGGGLVKPGESLRLSCAASGFTFSDYYMYWVRQAPGKGLEWVAIISDAGGLTYYSDIIKGRFTISRDNAKNSLYLQINSLKAEDTAVYYCARGFPLLRHGAMDYWGQGTLVTVSSGGGGSGGGGSGGGGSDIQMTQSPSSLSASVGDRVTITCKASQNVDTNVAWYQQKPGQAPKSLIYSASYRYSDVPSRFSGSASGTDFTLTISSLQSEDFATYYCQQYDDLRPTFGGGTKLEIKSGGGGSEVQLVESGGGLVQPGGSLKLSCAASGFTFNKYAMNWVRQAPGKGLEWVARIRSKYNNYATYYADSVKDRFTISRDDSKNTAYLQMNNLKTEDTAVYYCVRHGNFGNSYISYWAYWGQGTLVTVSSGGGGSGGGGSGGGGSQTVVTQEPSLTVSPGGTVTLTCGSSTGAVTSGNYPNWVQQKPGQAPRGLIGGTKFLAPGTPARFSGSLLGGKAALTLSGVQPEDEAEYYCVLWYSNRWVFGGGTKLTVLGGGGDKTHTCPPCPAPELLGGPSVFLFPPKPKDTLMISRTPEVTCVVVDVSHEDPEVKFNWYVDGVEVHNAKTKPCEEQYGSTYRCVSVLTVLHQDWLNGKEYKCKVSNKALPAPIEKTISKAKGQPREPQVYTLPPSREEMTKNQVSLTCLVKGFYPSDIAVEWESNGQPENNYKTTPPVLDSDGSFFLYSKLTVDKSRWQQGNVFSCSVMHEALHNHYTQKSLSLSPGKGGGGSGGGGSGGGGSGGGGSGGGGSGGGGSDKTHTCPPCPAPELLGGPSVFLFPPKPKDTLMISRTPEVTCVVVDVSHEDPEVKFNWYVDGVEVHNAKTKPCEEQYGSTYRCVSVLTVLHQDWLNGKEYKCKVSNKALPAPIEKTISKAKGQPREPQVYTLPPSREEMTKNQVSLTCLVKGFYPSDIAVEWESNGQPENNYKTTPPVLDSDGSFFLYSKLTVDKSRWQQGNVFSCSVMHEALHNHYTQKSLSLSPGK

SEQ ID NO: 89 - protein, 984 aa, Artificial Sequence
  Synthetic peptide
QVQLVESGGGLVKPGESLRLSCAASGFTFSDYYMYWVRQAPGKGLEWVAIISDAGGLTYYSDIIKGRFTISRDNAKNSLYLQINSLKAEDTAVYYCARGFPLLRHGAMDYWGQGTLVTVSSGGGGSGGGGSGGGGSDIQMTQSPSSLSASVGDRVTITCKASQNVDTNVAWYQQKPGQAPKSLIYSASYRYSDVPSRFSGSASGTDFTLTISSLQSEDFATYYCQQYDDLRPTFGGGTKLEIKSGGGGSEVQLVESGGGLVQPGGSLKLSCAASGFTFNKYAMNWVRQAPGKGLEWVARIRSKYNNYATYYADSVKDRFTISRDDSKNTAYLQMNNLKTEDTAVYYCVRHGNFGNSYISYWAYWGQGTLVTVSSGGGGSGGGGSGGGGSQTVVTQEPSLTVSPGGTVTLTCGSSTGAVTSGNYPNWVQQKPGQAPRGLIGGTKFLAPGTPARFSGSLLGGKAALTLSGVQPEDEAEYYCVLWYSNRWVFGGGTKLTVLGGGGDKTHTCPPCPAPELLGGPSVFLFPPKPKDTLMISRTPEVTCVVVDVSHEDPEVKFNWYVDGVEVHNAKTKPCEEQYGSTYRCVSVLTVLHQDWLNGKEYKCKVSNKALPAPIEKTISKAKGQPREPQVYTLPPSREEMTKNQVSLTCLVKGFYPSDIAVEWESNGQPENNYKTTPPVLDSDGSFFLYSKLTVDKSRWQQGNVFSCSVMHEALHNHYTQKSLSLSPGGGGSGGGGSGGGGSGGGGSGGGGSGGGGSDKTHTCPPCPAPELLGGPSVFLFPPKPKDTLMISRTPEVTCVVVDVSHEDPEVKFNWYVDGVEVHNAKTKPCEEQYGSTYRCVSVLTVLHQDWLNGKEYKCKVSNKALPAPIEKTISKAKGQPREPQVYTLPPSREEMTKNQVSLTCLVKGFYPSDIAVEWESNGQPENNYKTTPPVLDSDGSFFLYSKLTVDKSRWQQGNVFSCSVMHEALHNHYTQKSLSLSPGK

SEQ ID NO: 90 - protein, 121 aa, Artificial Sequence; identical to SEQ ID NO: 72
  Synthetic peptide

SEQ ID NO: 91 - protein, 107 aa, Artificial Sequence
  Synthetic peptide
DIQMTQSPSSLSASVGDRVTITCKASQNVDTNVAWYQQKPGQAPKSLIYSASYRYSDVPSRFSGSASGTDFTLTISSLQSEDFATYYCQQYDDLRPTFGCGTKLEIK

SEQ ID NO: 92 - protein, 243 aa, Artificial Sequence
  Synthetic peptide
QVQLVESGGGLVKPGESLRLSCAASGFTFSDYYMYWVRQAPGKCLEWVAIISDAGGLTYYSDIIKGRFTISRDNAKNSLYLQINSLKAEDTAVYYCARGFPLLRHGAMDYWGQGTLVTVSSGGGGSGGGGSGGGGSDIQMTQSPSSLSASVGDRVTITCKASQNVDTNVAWYQQKPGQAPKSLIYSASYRYSDVPSRFSGSASGTDFTLTISSLQSEDFATYYCQQYDDLRPTFGCGTKLEIK

SEQ ID NO: 93 - protein, 498 aa, Artificial Sequence
  Synthetic peptide
QVQLVESGGGLVKPGESLRLSCAASGFTFSDYYMYWVRQAPGKCLEWVAIISDAGGLTYYSDIIKGRFTISRDNAKNSLYLQINSLKAEDTAVYYCARGFPLLRHGAMDYWGQGTLVTVSSGGGGSGGGGSGGGGSDIQMTQSPSSLSASVGDRVTITCKASQNVDTNVAWYQQKPGQAPKSLIYSASYRYSDVPSRFSGSASGTDFTLTISSLQSEDFATYYCQQYDDLRPTFGCGTKLEIKSGGGGSEVQLVESGGGLVQPGGSLKLSCAASGFTFNKYAMNWVRQAPGKGLEWVARIRSKYNNYATYYADSVKDRFTISRDDSKNTAYLQMNNLKTEDTAVYYCVRHGNFGNSYISYWAYWGQGTLVTVSSGGGGSGGGGSGGGGSQTVVTQEPSLTVSPGGTVTLTCGSSTGAVTSGNYPNWVQQKPGQAPRGLIGGTKFLAPGTPARFSGSLLGGKAALTLSGVQPEDEAEYYCVLWYSNRWVFGGGTKLTVL

SEQ ID NO: 94 - protein, 986 aa, Artificial Sequence
  Synthetic peptide
QVQLVESGGGLVKPGESLRLSCAASGFTFSDYYMYWVRQAPGKCLEWVAIISDAGGLTYYSDIIKGRFTISRDNAKNSLYLQINSLKAEDTAVYYCARGFPLLRHGAMDYWGQGTLVTVSSGGGGSGGGGSGGGGSDIQMTQSPSSLSASVGDRVTITCKASQNVDTNVAWYQQKPGQAPKSLIYSASYRYSDVPSRFSGSASGTDFTLTISSLQSEDFATYYCQQYDDLRPTFGCGTKLEIKSGGGGSEVQLVESGGGLVQPGGSLKLSCAASGFTFNKYAMNWVRQAPGKGLEWVARIRSKYNNYATYYADSVKDRFTISRDDSKNTAYLQMNNLKTEDTAVYYCVRHGNFGNSYISYWAYWGQGTLVTVSSGGGGSGGGGSGGGGSQTVVTQEPSLTVSPGGTVTLTCGSSTGAVTSGNYPNWVQQKPGQAPRGLIGGTKFLAPGTPARFSGSLLGGKAALTLSGVQPEDEAEYYCVLWYSNRWVFGGGTKLTVLGGGGDKTHTCPPCPAPELLGGPSVFLFPPKPKDTLMISRTPEVTCVVVDVSHEDPEVKFNWYVDGVEVHNAKTKPCEEQYGSTYRCVSVLTVLHQDWLNGKEYKCKVSNKALPAPIEKTISKAKGQPREPQVYTLPPSREEMTKNQVSLTCLVKGFYPSDIAVEWESNGQPENNYKTTPPVLDSDGSFFLYSKLTVDKSRWQQGNVFSCSVMHEALHNHYTQKSLSLSPGKGGGGSGGGGSGGGGSGGGGSGGGGSGGGGSDKTHTCPPCPAPELLGGPSVFLFPPKPKDTLMISRTPEVTCVVVDVSHEDPEVKFNWYVDGVEVHNAKTKPCEEQYGSTYRCVSVLTVLHQDWLNGKEYKCKVSNKALPAPIEKTISKAKGQPREPQVYTLPPSREEMTKNQVSLTCLVKGFYPSDIAVEWESNGQPENNYKTTPPVLDSDGSFFLYSKLTVDKSRWQQGNVFSCSVMHEALHNHYTQKSLSLSPGK

SEQ ID NO: 95 - protein, 984 aa, Artificial Sequence
  Synthetic peptide
QVQLVESGGGLVKPGESLRLSCAASGFTFSDYYMYWVRQAPGKCLEWVAIISDAGGLTYYSDIIKGRFTISRDNAKNSLYLQINSLKAEDTAVYYCARGFPLLRHGAMDYWGQGTLVTVSSGGGGSGGGGSGGGGSDIQMTQSPSSLSASVGDRVTITCKASQNVDTNVAWYQQKPGQAPKSLIYSASYRYSDVPSRFSGSASGTDFTLTISSLQSEDFATYYCQQYDDLRPTFGCGTKLEIKSGGGGSEVQLVESGGGLVQPGGSLKLSCAASGFTFNKYAMNWVRQAPGKGLEWVARIRSKYNNYATYYADSVKDRFTISRDDSKNTAYLQMNNLKTEDTAVYYCVRHGNFGNSYISYWAYWGQGTLVTVSSGGGGSGGGGSGGGGSQTVVTQEPSLTVSPGGTVTLTCGSSTGAVTSGNYPNWVQQKPGQAPRGLIGGTKFLAPGTPARFSGSLLGGKAALTLSGVQPEDEAEYYCVLWYSNRWVFGGGTKLTVLGGGGDKTHTCPPCPAPELLGGPSVFLFPPKPKDTLMISRTPEVTCVVVDVSHEDPEVKFNWYVDGVEVHNAKTKPCEEQYGSTYRCVSVLTVLHQDWLNGKEYKCKVSNKALPAPIEKTISKAKGQPREPQVYTLPPSREEMTKNQVSLTCLVKGFYPSDIAVEWESNGQPENNYKTTPPVLDSDGSFFLYSKLTVDKSRWQQGNVFSCSVMHEALHNHYTQKSLSLSPGGGGSGGGGSGGGGSGGGGSGGGGSGGGGSDKTHTCPPCPAPELLGGPSVFLFPPKPKDTLMISRTPEVTCVVVDVSHEDPEVKFNWYVDGVEVHNAKTKPCEEQYGSTYRCVSVLTVLHQDWLNGKEYKCKVSNKALPAPIEKTISKAKGQPREPQVYTLPPSREEMTKNQVSLTCLVKGFYPSDIAVEWESNGQPENNYKTTPPVLDSDGSFFLYSKLTVDKSRWQQGNVFSCSVMHEALHNHYTQKSLSLSPGK

SEQ ID NO: 96 - protein, 5 aa, Artificial Sequence
  Synthetic peptide
DYYMY

SEQ ID NO: 97 - protein, 17 aa, Artificial Sequence
  Synthetic peptide
IISDHYSHTYYSDIIKD

SEQ ID NO: 98 - protein, 12 aa, Artificial Sequence
  Synthetic peptide
GFPLLRHGAMDY

SEQ ID NO: 99 - protein, 11 aa, Artificial Sequence
  Synthetic peptide
KASQNVDTNVA

SEQ ID NO: 100 - protein, 7 aa, Artificial Sequence
  Synthetic peptide
SASYRYS

SEQ ID NO: 101 - protein, 9 aa, Artificial Sequence
  Synthetic peptide
QQYDSYPYT

SEQ ID NO: 102 - protein, 121 aa, Artificial Sequence
  Synthetic peptide
QVQLVESGGGLVKPGESLRLSCAASGFTFSDYYMYWVRQAPGKGLEWVAIISDHYSHTYYSDIIKDRFTISRDNAKNSLYLQMNSLKAEDTAVYYCARGFPLLRHGAMDYWGQGTLVTVSS

SEQ ID NO: 103 - protein, 107 aa, Artificial Sequence; identical to SEQ ID NO: 67
  Synthetic peptide

SEQ ID NO: 104 - protein, 243 aa, Artificial Sequence
  Synthetic peptide
QVQLVESGGGLVKPGESLRLSCAASGFTFSDYYMYWVRQAPGKGLEWVAIISDHYSHTYYSDIIKDRFTISRDNAKNSLYLQMNSLKAEDTAVYYCARGFPLLRHGAMDYWGQGTLVTVSSGGGGSGGGGSGGGGSDIQMTQSPSSLSASVGDRVTITCKASQNVDTNVAWYQQKPGQAPKSLIYSASYRYSDVPSRFSGSASGTDFTLTISSVQSEDFATYYCQQYDSYPYTFGGGTKLEIK

SEQ ID NO: 105 - protein, 498 aa, Artificial Sequence
  Synthetic peptide
QVQLVESGGGLVKPGESLRLSCAASGFTFSDYYMYWVRQAPGKGLEWVAIISDHYSHTYYSDIIKDRFTISRDNAKNSLYLQMNSLKAEDTAVYYCARGFPLLRHGAMDYWGQGTLVTVSSGGGGSGGGGSGGGGSDIQMTQSPSSLSASVGDRVTITCKASQNVDTNVAWYQQKPGQAPKSLIYSASYRYSDVPSRFSGSASGTDFTLTISSVQSEDFATYYCQQYDSYPYTFGGGTKLEIKSGGGGSEVQLVESGGGLVQPGGSLKLSCAASGFTFNKYAMNWVRQAPGKGLEWVARIRSKYNNYATYYADSVKDRFTISRDDSKNTAYLQMNNLKTEDTAVYYCVRHGNFGNSYISYWAYWGQGTLVTVSSGGGGSGGGGSGGGGSQTVVTQEPSLTVSPGGTVTLTCGSSTGAVTSGNYPNWVQQKPGQAPRGLIGGTKFLAPGTPARFSGSLLGGKAALTLSGVQPEDEAEYYCVLWYSNRWVFGGGTKLTVL

SEQ ID NO: 106 - protein, 986 aa, Artificial Sequence
  Synthetic peptide
QVQLVESGGGLVKPGESLRLSCAASGFTFSDYYMYWVRQAPGKGLEWVAIISDHYSHTYYSDIIKDRFTISRDNAKNSLYLQMNSLKAEDTAVYYCARGFPLLRHGAMDYWGQGTLVTVSSGGGGSGGGGSGGGGSDIQMTQSPSSLSASVGDRVTITCKASQNVDTNVAWYQQKPGQAPKSLIYSASYRYSDVPSRFSGSASGTDFTLTISSVQSEDFATYYCQQYDSYPYTFGGGTKLEIKSGGGGSEVQLVESGGGLVQPGGSLKLSCAASGFTFNKYAMNWVRQAPGKGLEWVARIRSKYNNYATYYADSVKDRFTISRDDSKNTAYLQMNNLKTEDTAVYYCVRHGNFGNSYISYWAYWGQGTLVTVSSGGGGSGGGGSGGGGSQTVVTQEPSLTVSPGGTVTLTCGSSTGAVTSGNYPNWVQQKPGQAPRGLIGGTKFLAPGTPARFSGSLLGGKAALTLSGVQPEDEAEYYCVLWYSNRWVFGGGTKLTVLGGGGDKTHTCPPCPAPELLGGPSVFLFPPKPKDTLMISRTPEVTCVVVDVSHEDPEVKFNWYVDGVEVHNAKTKPCEEQYGSTYRCVSVLTVLHQDWLNGKEYKCKVSNKALPAPIEKTISKAKGQPREPQVYTLPPSREEMTKNQVSLTCLVKGFYPSDIAVEWESNGQPENNYKTTPPVLDSDGSFFLYSKLTVDKSRWQQGNVFSCSVMHEALHNHYTQKSLSLSPGKGGGGSGGGGSGGGGSGGGGSGGGGSGGGGSDKTHTCPPCPAPELLGGPSVFLFPPKPKDTLMISRTPEVTCVVVDVSHEDPEVKFNWYVDGVEVHNAKTKPCEEQYGSTYRCVSVLTVLHQDWLNGKEYKCKVSNKALPAPIEKTISKAKGQPREPQVYTLPPSREEMTKNQVSLTCLVKGFYPSDIAVEWESNGQPENNYKTTPPVLDSDGSFFLYSKLTVDKSRWQQGNVFSCSVMHEALHNHYTQKSLSLSPGK

SEQ ID NO: 107 - protein, 984 aa, Artificial Sequence
  Synthetic peptide
QVQLVESGGGLVKPGESLRLSCAASGFTFSDYYMYWVRQAPGKGLEWVAIISDHYSHTYYSDIIKDRFTISRDNAKNSLYLQMNSLKAEDTAVYYCARGFPLLRHGAMDYWGQGTLVTVSSGGGGSGGGGSGGGGSDIQMTQSPSSLSASVGDRVTITCKASQNVDTNVAWYQQKPGQAPKSLIYSASYRYSDVPSRFSGSASGTDFTLTISSVQSEDFATYYCQQYDSYPYTFGGGTKLEIKSGGGGSEVQLVESGGGLVQPGGSLKLSCAASGFTFNKYAMNWVRQAPGKGLEWVARIRSKYNNYATYYADSVKDRFTISRDDSKNTAYLQMNNLKTEDTAVYYCVRHGNFGNSYISYWAYWGQGTLVTVSSGGGGSGGGGSGGGGSQTVVTQEPSLTVSPGGTVTLTCGSSTGAVTSGNYPNWVQQKPGQAPRGLIGGTKFLAPGTPARFSGSLLGGKAALTLSGVQPEDEAEYYCVLWYSNRWVFGGGTKLTVLGGGGDKTHTCPPCPAPELLGGPSVFLFPPKPKDTLMISRTPEVTCVVVDVSHEDPEVKFNWYVDGVEVHNAKTKPCEEQYGSTYRCVSVLTVLHQDWLNGKEYKCKVSNKALPAPIEKTISKAKGQPREPQVYTLPPSREEMTKNQVSLTCLVKGFYPSDIAVEWESNGQPENNYKTTPPVLDSDGSFFLYSKLTVDKSRWQQGNVFSCSVMHEALHNHYTQKSLSLSPGGGGSGGGGSGGGGSGGGGSGGGGSGGGGSDKTHTCPPCPAPELLGGPSVFLFPPKPKDTLMISRTPEVTCVVVDVSHEDPEVKFNWYVDGVEVHNAKTKPCEEQYGSTYRCVSVLTVLHQDWLNGKEYKCKVSNKALPAPIEKTISKAKGQPREPQVYTLPPSREEMTKNQVSLTCLVKGFYPSDIAVEWESNGQPENNYKTTPPVLDSDGSFFLYSKLTVDKSRWQQGNVFSCSVMHEALHNHYTQKSLSLSPGK

SEQ ID NO: 108 - protein, 121 aa, Artificial Sequence
  Synthetic peptide
QVQLVESGGGLVKPGESLRLSCAASGFTFSDYYMYWVRQAPGKCLEWVAIISDHYSHTYYSDIIKDRFTISRDNAKNSLYLQMNSLKAEDTAVYYCARGFPLLRHGAMDYWGQGTLVTVSS

SEQ ID NO: 109 - protein, 107 aa, Artificial Sequence; identical to SEQ ID NO: 73
  Synthetic peptide

SEQ ID NO: 110 - protein, 243 aa, Artificial Sequence
  Synthetic peptide
QVQLVESGGGLVKPGESLRLSCAASGFTFSDYYMYWVRQAPGKCLEWVAIISDHYSHTYYSDIIKDRFTISRDNAKNSLYLQMNSLKAEDTAVYYCARGFPLLRHGAMDYWGQGTLVTVSSGGGGSGGGGSGGGGSDIQMTQSPSSLSASVGDRVTITCKASQNVDTNVAWYQQKPGQAPKSLIYSASYRYSDVPSRFSGSASGTDFTLTISSVQSEDFATYYCQQYDSYPYTFGCGTKLEIK

SEQ ID NO: 111 - protein, 498 aa, Artificial Sequence
  Synthetic peptide
QVQLVESGGGLVKPGESLRLSCAASGFTFSDYYMYWVRQAPGKCLEWVAIISDHYSHTYYSDIIKDRFTISRDNAKNSLYLQMNSLKAEDTAVYYCARGFPLLRHGAMDYWGQGTLVTVSSGGGGSGGGGSGGGGSDIQMTQSPSSLSASVGDRVTITCKASQNVDTNVAWYQQKPGQAPKSLIYSASYRYSDVPSRFSGSASGTDFTLTISSVQSEDFATYYCQQYDSYPYTFGCGTKLEIKSGGGGSEVQLVESGGGLVQPGGSLKLSCAASGFTFNKYAMNWVRQAPGKGLEWVARIRSKYNNYATYYADSVKDRFTISRDDSKNTAYLQMNNLKTEDTAVYYCVRHGNFGNSYISYWAYWGQGTLVTVSSGGGGSGGGGSGGGGSQTVVTQEPSLTVSPGGTVTLTCGSSTGAVTSGNYPNWVQQKPGQAPRGLIGGTKFLAPGTPARFSGSLLGGKAALTLSGVQPEDEAEYYCVLWYSNRWVFGGGTKLTVL

SEQ ID NO: 112 - protein, 986 aa, Artificial Sequence
  Synthetic peptide
QVQLVESGGGLVKPGESLRLSCAASGFTFSDYYMYWVRQAPGKCLEWVAIISDHYSHTYYSDIIKDRFTISRDNAKNSLYLQMNSLKAEDTAVYYCARGFPLLRHGAMDYWGQGTLVTVSSGGGGSGGGGSGGGGSDIQMTQSPSSLSASVGDRVTITCKASQNVDTNVAWYQQKPGQAPKSLIYSASYRYSDVPSRFSGSASGTDFTLTISSVQSEDFATYYCQQYDSYPYTFGCGTKLEIKSGGGGSEVQLVESGGGLVQPGGSLKLSCAASGFTFNKYAMNWVRQAPGKGLEWVARIRSKYNNYATYYADSVKDRFTISRDDSKNTAYLQMNNLKTEDTAVYYCVRHGNFGNSYISYWAYWGQGTLVTVSSGGGGSGGGGSGGGGSQTVVTQEPSLTVSPGGTVTLTCGSSTGAVTSGNYPNWVQQKPGQAPRGLIGGTKFLAPGTPARFSGSLLGGKAALTLSGVQPEDEAEYYCVLWYSNRWVFGGGTKLTVLGGGGDKTHTCPPCPAPELLGGPSVFLFPPKPKDTLMISRTPEVTCVVVDVSHEDPEVKFNWYVDGVEVHNAKTKPCEEQYGSTYRCVSVLTVLHQDWLNGKEYKCKVSNKALPAPIEKTISKAKGQPREPQVYTLPPSREEMTKNQVSLTCLVKGFYPSDIAVEWESNGQPENNYKTTPPVLDSDGSFFLYSKLTVDKSRWQQGNVFSCSVMHEALHNHYTQKSLSLSPGKGGGGSGGGGSGGGGSGGGGSGGGGSGGGGSDKTHTCPPCPAPELLGGPSVFLFPPKPKDTLMISRTPEVTCVVVDVSHEDPEVKFNWYVDGVEVHNAKTKPCEEQYGSTYRCVSVLTVLHQDWLNGKEYKCKVSNKALPAPIEKTISKAKGQPREPQVYTLPPSREEMTKNQVSLTCLVKGFYPSDIAVEWESNGQPENNYKTTPPVLDSDGSFFLYSKLTVDKSRWQQGNVFSCSVMHEALHNHYTQKSLSLSPGK

SEQ ID NO: 113 - protein, 984 aa, Artificial Sequence
  Synthetic peptide
QVQLVESGGGLVKPGESLRLSCAASGFTFSDYYMYWVRQAPGKCLEWVAIISDHYSHTYYSDIIKDRFTISRDNAKNSLYLQMNSLKAEDTAVYYCARGFPLLRHGAMDYWGQGTLVTVSSGGGGSGGGGSGGGGSDIQMTQSPSSLSASVGDRVTITCKASQNVDTNVAWYQQKPGQAPKSLIYSASYRYSDVPSRFSGSASGTDFTLTISSVQSEDFATYYCQQYDSYPYTFGCGTKLEIKSGGGGSEVQLVESGGGLVQPGGSLKLSCAASGFTFNKYAMNWVRQAPGKGLEWVARIRSKYNNYATYYADSVKDRFTISRDDSKNTAYLQMNNLKTEDTAVYYCVRHGNFGNSYISYWAYWGQGTLVTVSSGGGGSGGGGSGGGGSQTVVTQEPSLTVSPGGTVTLTCGSSTGAVTSGNYPNWVQQKPGQAPRGLIGGTKFLAPGTPARFSGSLLGGKAALTLSGVQPEDEAEYYCVLWYSNRWVFGGGTKLTVLGGGGDKTHTCPPCPAPELLGGPSVFLFPPKPKDTLMISRTPEVTCVVVDVSHEDPEVKFNWYVDGVEVHNAKTKPCEEQYGSTYRCVSVLTVLHQDWLNGKEYKCKVSNKALPAPIEKTISKAKGQPREPQVYTLPPSREEMTKNQVSLTCLVKGFYPSDIAVEWESNGQPENNYKTTPPVLDSDGSFFLYSKLTVDKSRWQQGNVFSCSVMHEALHNHYTQKSLSLSPGGGGSGGGGSGGGGSGGGGSGGGGSGGGGSDKTHTCPPCPAPELLGGPSVFLFPPKPKDTLMISRTPEVTCVVVDVSHEDPEVKFNWYVDGVEVHNAKTKPCEEQYGSTYRCVSVLTVLHQDWLNGKEYKCKVSNKALPAPIEKTISKAKGQPREPQVYTLPPSREEMTKNQVSLTCLVKGFYPSDIAVEWESNGQPENNYKTTPPVLDSDGSFFLYSKLTVDKSRWQQGNVFSCSVMHEALHNHYTQKSLSLSPGK

SEQ ID NO: 114 - protein, 5 aa, Artificial Sequence
  Synthetic peptide
DYYMY

SEQ ID NO: 115 - protein, 17 aa, Artificial Sequence
  Synthetic peptide
IISDKRHHTYYSDIIKG

SEQ ID NO: 116 - protein, 12 aa, Artificial Sequence
  Synthetic peptide
GFPLLRHGAMDY

SEQ ID NO: 117 - protein, 11 aa, Artificial Sequence
  Synthetic peptide
KASQNVDTNVA

SEQ ID NO: 118 - protein, 7 aa, Artificial Sequence
  Synthetic peptide
SASYRYS

SEQ ID NO: 119 - protein, 9 aa, Artificial Sequence
  Synthetic peptide
QQYDSYPYT

SEQ ID NO: 120 - protein, 121 aa, Artificial Sequence
  Synthetic peptide
QVQLVESGGGLVKPGESLRLSCAASGFTFSDYYMYWVRQAPGKGLEWVAIISDKRHHTYYSDIIKGRFTISRDNAKNSLYLQMNSLKAEDTAVYYCARGFPLLRHGAMDYWGQGTLVTVSS

SEQ ID NO: 121 - protein, 107 aa, Artificial Sequence; identical to SEQ ID NO: 67
  Synthetic peptide

SEQ ID NO: 122 - protein, 243 aa, Artificial Sequence
  Synthetic peptide
QVQLVESGGGLVKPGESLRLSCAASGFTFSDYYMYWVRQAPGKGLEWVAIISDKRHHTYYSDIIKGRFTISRDNAKNSLYLQMNSLKAEDTAVYYCARGFPLLRHGAMDYWGQGTLVTVSSGGGGSGGGGSGGGGSDIQMTQSPSSLSASVGDRVTITCKASQNVDTNVAWYQQKPGQAPKSLIYSASYRYSDVPSRFSGSASGTDFTLTISSVQSEDFATYYCQQYDSYPYTFGGGTKLEIK

SEQ ID NO: 123 - protein, 498 aa, Artificial Sequence
  Synthetic peptide
QVQLVESGGGLVKPGESLRLSCAASGFTFSDYYMYWVRQAPGKGLEWVAIISDKRHHTYYSDIIKGRFTISRDNAKNSLYLQMNSLKAEDTAVYYCARGFPLLRHGAMDYWGQGTLVTVSSGGGGSGGGGSGGGGSDIQMTQSPSSLSASVGDRVTITCKASQNVDTNVAWYQQKPGQAPKSLIYSASYRYSDVPSRFSGSASGTDFTLTISSVQSEDFATYYCQQYDSYPYTFGGGTKLEIKSGGGGSEVQLVESGGGLVQPGGSLKLSCAASGFTFNKYAMNWVRQAPGKGLEWVARIRSKYNNYATYYADSVKDRFTISRDDSKNTAYLQMNNLKTEDTAVYYCVRHGNFGNSYISYWAYWGQGTLVTVSSGGGGSGGGGSGGGGSQTVVTQEPSLTVSPGGTVTLTCGSSTGAVTSGNYPNWVQQKPGQAPRGLIGGTKFLAPGTPARFSGSLLGGKAALTLSGVQPEDEAEYYCVLWYSNRWVFGGGTKLTVL

SEQ ID NO: 124 - protein, 986 aa, Artificial Sequence
  Synthetic peptide
QVQLVESGGGLVKPGESLRLSCAASGFTFSDYYMYWVRQAPGKGLEWVAIISDKRHHTYYSDIIKGRFTISRDNAKNSLYLQMNSLKAEDTAVYYCARGFPLLRHGAMDYWGQGTLVTVSSGGGGSGGGGSGGGGSDIQMTQSPSSLSASVGDRVTITCKASQNVDTNVAWYQQKPGQAPKSLIYSASYRYSDVPSRFSGSASGTDFTLTISSVQSEDFATYYCQQYDSYPYTFGGGTKLEIKSGGGGSEVQLVESGGGLVQPGGSLKLSCAASGFTFNKYAMNWVRQAPGKGLEWVARIRSKYNNYATYYADSVKDRFTISRDDSKNTAYLQMNNLKTEDTAVYYCVRHGNFGNSYISYWAYWGQGTLVTVSSGGGGSGGGGSGGGGSQTVVTQEPSLTVSPGGTVTLTCGSSTGAVTSGNYPNWVQQKPGQAPRGLIGGTKFLAPGTPARFSGSLLGGKAALTLSGVQPEDEAEYYCVLWYSNRWVFGGGTKLTVLGGGGDKTHTCPPCPAPELLGGPSVFLFPPKPKDTLMISRTPEVTCVVVDVSHEDPEVKFNWYVDGVEVHNAKTKPCEEQYGSTYRCVSVLTVLHQDWLNGKEYKCKVSNKALPAPIEKTISKAKGQPREPQVYTLPPSREEMTKNQVSLTCLVKGFYPSDIAVEWESNGQPENNYKTTPPVLDSDGSFFLYSKLTVDKSRWQQGNVFSCSVMHEALHNHYTQKSLSLSPGKGGGGSGGGGSGGGGSGGGGSGGGGSGGGGSDKTHTCPPCPAPELLGGPSVFLFPPKPKDTLMISRTPEVTCVVVDVSHEDPEVKFNWYVDGVEVHNAKTKPCEEQYGSTYRCVSVLTVLHQDWLNGKEYKCKVSNKALPAPIEKTISKAKGQPREPQVYTLPPSREEMTKNQVSLTCLVKGFYPSDIAVEWESNGQPENNYKTTPPVLDSDGSFFLYSKLTVDKSRWQQGNVFSCSVMHEALHNHYTQKSLSLSPGK

SEQ ID NO: 125 - protein, 984 aa, Artificial Sequence
  Synthetic peptide
QVQLVESGGGLVKPGESLRLSCAASGFTFSDYYMYWVRQAPGKGLEWVAIISDKRHHTYYSDIIKGRFTISRDNAKNSLYLQMNSLKAEDTAVYYCARGFPLLRHGAMDYWGQGTLVTVSSGGGGSGGGGSGGGGSDIQMTQSPSSLSASVGDRVTITCKASQNVDTNVAWYQQKPGQAPKSLIYSASYRYSDVPSRFSGSASGTDFTLTISSVQSEDFATYYCQQYDSYPYTFGGGTKLEIKSGGGGSEVQLVESGGGLVQPGGSLKLSCAASGFTFNKYAMNWVRQAPGKGLEWVARIRSKYNNYATYYADSVKDRFTISRDDSKNTAYLQMNNLKTEDTAVYYCVRHGNFGNSYISYWAYWGQGTLVTVSSGGGGSGGGGSGGGGSQTVVTQEPSLTVSPGGTVTLTCGSSTGAVTSGNYPNWVQQKPGQAPRGLIGGTKFLAPGTPARFSGSLLGGKAALTLSGVQPEDEAEYYCVLWYSNRWVFGGGTKLTVLGGGGDKTHTCPPCPAPELLGGPSVFLFPPKPKDTLMISRTPEVTCVVVDVSHEDPEVKFNWYVDGVEVHNAKTKPCEEQYGSTYRCVSVLTVLHQDWLNGKEYKCKVSNKALPAPIEKTISKAKGQPREPQVYTLPPSREEMTKNQVSLTCLVKGFYPSDIAVEWESNGQPENNYKTTPPVLDSDGSFFLYSKLTVDKSRWQQGNVFSCSVMHEALHNHYTQKSLSLSPGGGGSGGGGSGGGGSGGGGSGGGGSGGGGSDKTHTCPPCPAPELLGGPSVFLFPPKPKDTLMISRTPEVTCVVVDVSHEDPEVKFNWYVDGVEVHNAKTKPCEEQYGSTYRCVSVLTVLHQDWLNGKEYKCKVSNKALPAPIEKTISKAKGQPREPQVYTLPPSREEMTKNQVSLTCLVKGFYPSDIAVEWESNGQPENNYKTTPPVLDSDGSFFLYSKLTVDKSRWQQGNVFSCSVMHEALHNHYTQKSLSLSPGK

SEQ ID NO: 126 - protein, 121 aa, Artificial Sequence
  Synthetic peptide
QVQLVESGGGLVKPGESLRLSCAASGFTFSDYYMYWVRQAPGKCLEWVAIISDKRHHTYYSDIIKGRFTISRDNAKNSLYLQMNSLKAEDTAVYYCARGFPLLRHGAMDYWGQGTLVTVSS

SEQ ID NO: 127 - protein, 107 aa, Artificial Sequence; identical to SEQ ID NO: 73
  Synthetic peptide

SEQ ID NO: 128 - protein, 243 aa, Artificial Sequence
  Synthetic peptide
QVQLVESGGGLVKPGESLRLSCAASGFTFSDYYMYWVRQAPGKCLEWVAIISDKRHHTYYSDIIKGRFTISRDNAKNSLYLQMNSLKAEDTAVYYCARGFPLLRHGAMDYWGQGTLVTVSSGGGGSGGGGSGGGGSDIQMTQSPSSLSASVGDRVTITCKASQNVDTNVAWYQQKPGQAPKSLIYSASYRYSDVPSRFSGSASGTDFTLTISSVQSEDFATYYCQQYDSYPYTFGCGTKLEIK

SEQ ID NO: 129 - protein, 498 aa, Artificial Sequence
  Synthetic peptide
QVQLVESGGGLVKPGESLRLSCAASGFTFSDYYMYWVRQAPGKCLEWVAIISDKRHHTYYSDIIKGRFTISRDNAKNSLYLQMNSLKAEDTAVYYCARGFPLLRHGAMDYWGQGTLVTVSSGGGGSGGGGSGGGGSDIQMTQSPSSLSASVGDRVTITCKASQNVDTNVAWYQQKPGQAPKSLIYSASYRYSDVPSRFSGSASGTDFTLTISSVQSEDFATYYCQQYDSYPYTFGCGTKLEIKSGGGGSEVQLVESGGGLVQPGGSLKLSCAASGFTFNKYAMNWVRQAPGKGLEWVARIRSKYNNYATYYADSVKDRFTISRDDSKNTAYLQMNNLKTEDTAVYYCVRHGNFGNSYISYWAYWGQGTLVTVSSGGGGSGGGGSGGGGSQTVVTQEPSLTVSPGGTVTLTCGSSTGAVTSGNYPNWVQQKPGQAPRGLIGGTKFLAPGTPARFSGSLLGGKAALTLSGVQPEDEAEYYCVLWYSNRWVFGGGTKLTVL

SEQ ID NO: 130 - protein, 986 aa, Artificial Sequence
  Synthetic peptide
QVQLVESGGGLVKPGESLRLSCAASGFTFSDYYMYWVRQAPGKCLEWVAIISDKRHHTYYSDIIKGRFTISRDNAKNSLYLQMNSLKAEDTAVYYCARGFPLLRHGAMDYWGQGTLVTVSSGGGGSGGGGSGGGGSDIQMTQSPSSLSASVGDRVTITCKASQNVDTNVAWYQQKPGQAPKSLIYSASYRYSDVPSRFSGSASGTDFTLTISSVQSEDFATYYCQQYDSYPYTFGCGTKLEIKSGGGGSEVQLVESGGGLVQPGGSLKLSCAASGFTFNKYAMNWVRQAPGKGLEWVARIRSKYNNYATYYADSVKDRFTISRDDSKNTAYLQMNNLKTEDTAVYYCVRHGNFGNSYISYWAYWGQGTLVTVSSGGGGSGGGGSGGGGSQTVVTQEPSLTVSPGGTVTLTCGSSTGAVTSGNYPNWVQQKPGQAPRGLIGGTKFLAPGTPARFSGSLLGGKAALTLSGVQPEDEAEYYCVLWYSNRWVFGGGTKLTVLGGGGDKTHTCPPCPAPELLGGPSVFLFPPKPKDTLMISRTPEVTCVVVDVSHEDPEVKFNWYVDGVEVHNAKTKPCEEQYGSTYRCVSVLTVLHQDWLNGKEYKCKVSNKALPAPIEKTISKAKGQPREPQVYTLPPSREEMTKNQVSLTCLVKGFYPSDIAVEWESNGQPENNYKTTPPVLDSDGSFFLYSKLTVDKSRWQQGNVFSCSVMHEALHNHYTQKSLSLSPGKGGGGSGGGGSGGGGSGGGGSGGGGSGGGGSDKTHTCPPCPAPELLGGPSVFLFPPKPKDTLMISRTPEVTCVVVDVSHEDPEVKFNWYVDGVEVHNAKTKPCEEQYGSTYRCVSVLTVLHQDWLNGKEYKCKVSNKALPAPIEKTISKAKGQPREPQVYTLPPSREEMTKNQVSLTCLVKGFYPSDIAVEWESNGQPENNYKTTPPVLDSDGSFFLYSKLTVDKSRWQQGNVFSCSVMHEALHNHYTQKSLSLSPGK

SEQ ID NO: 131 - protein, 984 aa, Artificial Sequence
  Synthetic peptide
QVQLVESGGGLVKPGESLRLSCAASGFTFSDYYMYWVRQAPGKCLEWVAIISDKRHHTYYSDIIKGRFTISRDNAKNSLYLQMNSLKAEDTAVYYCARGFPLLRHGAMDYWGQGTLVTVSSGGGGSGGGGSGGGGSDIQMTQSPSSLSASVGDRVTITCKASQNVDTNVAWYQQKPGQAPKSLIYSASYRYSDVPSRFSGSASGTDFTLTISSVQSEDFATYYCQQYDSYPYTFGCGTKLEIKSGGGGSEVQLVESGGGLVQPGGSLKLSCAASGFTFNKYAMNWVRQAPGKGLEWVARIRSKYNNYATYYADSVKDRFTISRDDSKNTAYLQMNNLKTEDTAVYYCVRHGNFGNSYISYWAYWGQGTLVTVSSGGGGSGGGGSGGGGSQTVVTQEPSLTVSPGGTVTLTCGSSTGAVTSGNYPNWVQQKPGQAPRGLIGGTKFLAPGTPARFSGSLLGGKAALTLSGVQPEDEAEYYCVLWYSNRWVFGGGTKLTVLGGGGDKTHTCPPCPAPELLGGPSVFLFPPKPKDTLMISRTPEVTCVVVDVSHEDPEVKFNWYVDGVEVHNAKTKPCEEQYGSTYRCVSVLTVLHQDWLNGKEYKCKVSNKALPAPIEKTISKAKGQPREPQVYTLPPSREEMTKNQVSLTCLVKGFYPSDIAVEWESNGQPENNYKTTPPVLDSDGSFFLYSKLTVDKSRWQQGNVFSCSVMHEALHNHYTQKSLSLSPGGGGSGGGGSGGGGSGGGGSGGGGSGGGGSDKTHTCPPCPAPELLGGPSVFLFPPKPKDTLMISRTPEVTCVVVDVSHEDPEVKFNWYVDGVEVHNAKTKPCEEQYGSTYRCVSVLTVLHQDWLNGKEYKCKVSNKALPAPIEKTISKAKGQPREPQVYTLPPSREEMTKNQVSLTCLVKGFYPSDIAVEWESNGQPENNYKTTPPVLDSDGSFFLYSKLTVDKSRWQQGNVFSCSVMHEALHNHYTQKSLSLSPGK

SEQ ID NO: 132 - protein, 5 aa, Artificial Sequence
  Synthetic peptide
DYYMY

SEQ ID NO: 133 - protein, 17 aa, Artificial Sequence
  Synthetic peptide
IISDKRHHTYYSDIIKG

SEQ ID NO: 134 - protein, 12 aa, Artificial Sequence
  Synthetic peptide
GFPLLRHGAMDY

SEQ ID NO: 135 - protein, 11 aa, Artificial Sequence
  Synthetic peptide
KASQNVDTNVA

SEQ ID NO: 136 - protein, 7 aa, Artificial Sequence
  Synthetic peptide
SASYRYS

SEQ ID NO: 137 - protein, 9 aa, Artificial Sequence
  Synthetic peptide
QQYDDLRPT

SEQ ID NO: 138 - protein, 121 aa, Artificial Sequence; identical to SEQ ID NO: 120
  Synthetic peptide

SEQ ID NO: 139 - protein, 107 aa, Artificial Sequence; identical to SEQ ID NO: 85
  Synthetic peptide

SEQ ID NO: 140 - protein, 243 aa, Artificial Sequence
  Synthetic peptide
QVQLVESGGGLVKPGESLRLSCAASGFTFSDYYMYWVRQAPGKGLEWVAIISDKRHHTYYSDIIKGRFTISRDNAKNSLYLQMNSLKAEDTAVYYCARGFPLLRHGAMDYWGQGTLVTVSSGGGGSGGGGSGGGGSDIQMTQSPSSLSASVGDRVTITCKASQNVDTNVAWYQQKPGQAPKSLIYSASYRYSDVPSRFSGSASGTDFTLTISSLQSEDFATYYCQQYDDLRPTFGGGTKLEIK

SEQ ID NO: 141 - protein, 498 aa, Artificial Sequence
  Synthetic peptide
QVQLVESGGGLVKPGESLRLSCAASGFTFSDYYMYWVRQAPGKGLEWVAIISDKRHHTYYSDIIKGRFTISRDNAKNSLYLQMNSLKAEDTAVYYCARGFPLLRHGAMDYWGQGTLVTVSSGGGGSGGGGSGGGGSDIQMTQSPSSLSASVGDRVTITCKASQNVDTNVAWYQQKPGQAPKSLIYSASYRYSDVPSRFSGSASGTDFTLTISSLQSEDFATYYCQQYDDLRPTFGGGTKLEIKSGGGGSEVQLVESGGGLVQPGGSLKLSCAASGFTFNKYAMNWVRQAPGKGLEWVARIRSKYNNYATYYADSVKDRFTISRDDSKNTAYLQMNNLKTEDTAVYYCVRHGNFGNSYISYWAYWGQGTLVTVSSGGGGSGGGGSGGGGSQTVVTQEPSLTVSPGGTVTLTCGSSTGAVTSGNYPNWVQQKPGQAPRGLIGGTKFLAPGTPARFSGSLLGGKAALTLSGVQPEDEAEYYCVLWYSNRWVFGGGTKLTVL

SEQ ID NO: 142 - protein, 986 aa, Artificial Sequence
  Synthetic peptide
QVQLVESGGGLVKPGESLRLSCAASGFTFSDYYMYWVRQAPGKGLEWVAIISDKRHHTYYSDIIKGRFTISRDNAKNSLYLQMNSLKAEDTAVYYCARGFPLLRHGAMDYWGQGTLVTVSSGGGGSGGGGSGGGGSDIQMTQSPSSLSASVGDRVTITCKASQNVDTNVAWYQQKPGQAPKSLIYSASYRYSDVPSRFSGSASGTDFTLTISSLQSEDFATYYCQQYDDLRPTFGGGTKLEIKSGGGGSEVQLVESGGGLVQPGGSLKLSCAASGFTFNKYAMNWVRQAPGKGLEWVARIRSKYNNYATYYADSVKDRFTISRDDSKNTAYLQMNNLKTEDTAVYYCVRHGNFGNSYISYWAYWGQGTLVTVSSGGGGSGGGGSGGGGSQTVVTQEPSLTVSPGGTVTLTCGSSTGAVTSGNYPNWVQQKPGQAPRGLIGGTKFLAPGTPARFSGSLLGGKAALTLSGVQPEDEAEYYCVLWYSNRWVFGGGTKLTVLGGGGDKTHTCPPCPAPELLGGPSVFLFPPKPKDTLMISRTPEVTCVVVDVSHEDPEVKFNWYVDGVEVHNAKTKPCEEQYGSTYRCVSVLTVLHQDWLNGKEYKCKVSNKALPAPIEKTISKAKGQPREPQVYTLPPSREEMTKNQVSLTCLVKGFYPSDIAVEWESNGQPENNYKTTPPVLDSDGSFFLYSKLTVDKSRWQQGNVFSCSVMHEALHNHYTQKSLSLSPGKGGGGSGGGGSGGGGSGGGGSGGGGSGGGGSDKTHTCPPCPAPELLGGPSVFLFPPKPKDTLMISRTPEVTCVVVDVSHEDPEVKFNWYVDGVEVHNAKTKPCEEQYGSTYRCVSVLTVLHQDWLNGKEYKCKVSNKALPAPIEKTISKAKGQPREPQVYTLPPSREEMTKNQVSLTCLVKGFYPSDIAVEWESNGQPENNYKTTPPVLDSDGSFFLYSKLTVDKSRWQQGNVFSCSVMHEALHNHYTQKSLSLSPGK

SEQ ID NO: 143 - protein, 984 aa, Artificial Sequence
  Synthetic peptide
QVQLVESGGGLVKPGESLRLSCAASGFTFSDYYMYWVRQAPGKGLEWVAIISDKRHHTYYSDIIKGRFTISRDNAKNSLYLQMNSLKAEDTAVYYCARGFPLLRHGAMDYWGQGTLVTVSSGGGGSGGGGSGGGGSDIQMTQSPSSLSASVGDRVTITCKASQNVDTNVAWYQQKPGQAPKSLIYSASYRYSDVPSRFSGSASGTDFTLTISSLQSEDFATYYCQQYDDLRPTFGGGTKLEIKSGGGGSEVQLVESGGGLVQPGGSLKLSCAASGFTFNKYAMNWVRQAPGKGLEWVARIRSKYNNYATYYADSVKDRFTISRDDSKNTAYLQMNNLKTEDTAVYYCVRHGNFGNSYISYWAYWGQGTLVTVSSGGGGSGGGGSGGGGSQTVVTQEPSLTVSPGGTVTLTCGSSTGAVTSGNYPNWVQQKPGQAPRGLIGGTKFLAPGTPARFSGSLLGGKAALTLSGVQPEDEAEYYCVLWYSNRWVFGGGTKLTVLGGGGDKTHTCPPCPAPELLGGPSVFLFPPKPKDTLMISRTPEVTCVVVDVSHEDPEVKFNWYVDGVEVHNAKTKPCEEQYGSTYRCVSVLTVLHQDWLNGKEYKCKVSNKALPAPIEKTISKAKGQPREPQVYTLPPSREEMTKNQVSLTCLVKGFYPSDIAVEWESNGQPENNYKTTPPVLDSDGSFFLYSKLTVDKSRWQQGNVFSCSVMHEALHNHYTQKSLSLSPGGGGSGGGGSGGGGSGGGGSGGGGSGGGGSDKTHTCPPCPAPELLGGPSVFLFPPKPKDTLMISRTPEVTCVVVDVSHEDPEVKFNWYVDGVEVHNAKTKPCEEQYGSTYRCVSVLTVLHQDWLNGKEYKCKVSNKALPAPIEKTISKAKGQPREPQVYTLPPSREEMTKNQVSLTCLVKGFYPSDIAVEWESNGQPENNYKTTPPVLDSDGSFFLYSKLTVDKSRWQQGNVFSCSVMHEALHNHYTQKSLSLSPGK

SEQ ID NO: 144 - protein, 121 aa, Artificial Sequence; identical to SEQ ID NO: 126
  Synthetic peptide

SEQ ID NO: 145 - protein, 107 aa, Artificial Sequence; identical to SEQ ID NO: 91
  Synthetic peptide

SEQ ID NO: 146 - protein, 243 aa, Artificial Sequence
  Synthetic peptide
QVQLVESGGGLVKPGESLRLSCAASGFTFSDYYMYWVRQAPGKCLEWVAIISDKRHHTYYSDIIKGRFTISRDNAKNSLYLQMNSLKAEDTAVYYCARGFPLLRHGAMDYWGQGTLVTVSSGGGGSGGGGSGGGGSDIQMTQSPSSLSASVGDRVTITCKASQNVDTNVAWYQQKPGQAPKSLIYSASYRYSDVPSRFSGSASGTDFTLTISSLQSEDFATYYCQQYDDLRPTFGCGTKLEIK

SEQ ID NO: 147 - protein, 498 aa, Artificial Sequence
  Synthetic peptide
QVQLVESGGGLVKPGESLRLSCAASGFTFSDYYMYWVRQAPGKCLEWVAIISDKRHHTYYSDIIKGRFTISRDNAKNSLYLQMNSLKAEDTAVYYCARGFPLLRHGAMDYWGQGTLVTVSSGGGGSGGGGSGGGGSDIQMTQSPSSLSASVGDRVTITCKASQNVDTNVAWYQQKPGQAPKSLIYSASYRYSDVPSRFSGSASGTDFTLTISSLQSEDFATYYCQQYDDLRPTFGCGTKLEIKSGGGGSEVQLVESGGGLVQPGGSLKLSCAASGFTFNKYAMNWVRQAPGKGLEWVARIRSKYNNYATYYADSVKDRFTISRDDSKNTAYLQMNNLKTEDTAVYYCVRHGNFGNSYISYWAYWGQGTLVTVSSGGGGSGGGGSGGGGSQTVVTQEPSLTVSPGGTVTLTCGSSTGAVTSGNYPNWVQQKPGQAPRGLIGGTKFLAPGTPARFSGSLLGGKAALTLSGVQPEDEAEYYCVLWYSNRWVFGGGTKLTVL

SEQ ID NO: 148 - protein, 986 aa, Artificial Sequence
  Synthetic peptide
QVQLVESGGGLVKPGESLRLSCAASGFTFSDYYMYWVRQAPGKCLEWVAIISDKRHHTYYSDIIKGRFTISRDNAKNSLYLQMNSLKAEDTAVYYCARGFPLLRHGAMDYWGQGTLVTVSSGGGGSGGGGSGGGGSDIQMTQSPSSLSASVGDRVTITCKASQNVDTNVAWYQQKPGQAPKSLIYSASYRYSDVPSRFSGSASGTDFTLTISSLQSEDFATYYCQQYDDLRPTFGCGTKLEIKSGGGGSEVQLVESGGGLVQPGGSLKLSCAASGFTFNKYAMNWVRQAPGKGLEWVARIRSKYNNYATYYADSVKDRFTISRDDSKNTAYLQMNNLKTEDTAVYYCVRHGNFGNSYISYWAYWGQGTLVTVSSGGGGSGGGGSGGGGSQTVVTQEPSLTVSPGGTVTLTCGSSTGAVTSGNYPNWVQQKPGQAPRGLIGGTKFLAPGTPARFSGSLLGGKAALTLSGVQPEDEAEYYCVLWYSNRWVFGGGTKLTVLGGGGDKTHTCPPCPAPELLGGPSVFLFPPKPKDTLMISRTPEVTCVVVDVSHEDPEVKFNWYVDGVEVHNAKTKPCEEQYGSTYRCVSVLTVLHQDWLNGKEYKCKVSNKALPAPIEKTISKAKGQPREPQVYTLPPSREEMTKNQVSLTCLVKGFYPSDIAVEWESNGQPENNYKTTPPVLDSDGSFFLYSKLTVDKSRWQQGNVFSCSVMHEALHNHYTQKSLSLSPGKGGGGSGGGGSGGGGSGGGGSGGGGSGGGGSDKTHTCPPCPAPELLGGPSVFLFPPKPKDTLMISRTPEVTCVVVDVSHEDPEVKFNWYVDGVEVHNAKTKPCEEQYGSTYRCVSVLTVLHQDWLNGKEYKCKVSNKALPAPIEKTISKAKGQPREPQVYTLPPSREEMTKNQVSLTCLVKGFYPSDIAVEWESNGQPENNYKTTPPVLDSDGSFFLYSKLTVDKSRWQQGNVFSCSVMHEALHNHYTQKSLSLSPGK

SEQ ID NO: 149 - protein, 984 aa, Artificial Sequence
  Synthetic peptide
QVQLVESGGGLVKPGESLRLSCAASGFTFSDYYMYWVRQAPGKCLEWVAIISDKRHHTYYSDIIKGRFTISRDNAKNSLYLQMNSLKAEDTAVYYCARGFPLLRHGAMDYWGQGTLVTVSSGGGGSGGGGSGGGGSDIQMTQSPSSLSASVGDRVTITCKASQNVDTNVAWYQQKPGQAPKSLIYSASYRYSDVPSRFSGSASGTDFTLTISSLQSEDFATYYCQQYDDLRPTFGCGTKLEIKSGGGGSEVQLVESGGGLVQPGGSLKLSCAASGFTFNKYAMNWVRQAPGKGLEWVARIRSKYNNYATYYADSVKDRFTISRDDSKNTAYLQMNNLKTEDTAVYYCVRHGNFGNSYISYWAYWGQGTLVTVSSGGGGSGGGGSGGGGSQTVVTQEPSLTVSPGGTVTLTCGSSTGAVTSGNYPNWVQQKPGQAPRGLIGGTKFLAPGTPARFSGSLLGGKAALTLSGVQPEDEAEYYCVLWYSNRWVFGGGTKLTVLGGGGDKTHTCPPCPAPELLGGPSVFLFPPKPKDTLMISRTPEVTCVVVDVSHEDPEVKFNWYVDGVEVHNAKTKPCEEQYGSTYRCVSVLTVLHQDWLNGKEYKCKVSNKALPAPIEKTISKAKGQPREPQVYTLPPSREEMTKNQVSLTCLVKGFYPSDIAVEWESNGQPENNYKTTPPVLDSDGSFFLYSKLTVDKSRWQQGNVFSCSVMHEALHNHYTQKSLSLSPGGGGSGGGGSGGGGSGGGGSGGGGSGGGGSDKTHTCPPCPAPELLGGPSVFLFPPKPKDTLMISRTPEVTCVVVDVSHEDPEVKFNWYVDGVEVHNAKTKPCEEQYGSTYRCVSVLTVLHQDWLNGKEYKCKVSNKALPAPIEKTISKAKGQPREPQVYTLPPSREEMTKNQVSLTCLVKGFYPSDIAVEWESNGQPENNYKTTPPVLDSDGSFFLYSKLTVDKSRWQQGNVFSCSVMHEALHNHYTQKSLSLSPGK

SEQ ID NO: 150 - protein, 5 aa, Artificial Sequence
  Synthetic peptide
DYYMY

SEQ ID NO: 151 - protein, 17 aa, Artificial Sequence
  Synthetic peptide
IISDGGYYTYYSDIIKG

SEQ ID NO: 152 - protein, 12 aa, Artificial Sequence
  Synthetic peptide
GFPLLRHGAMDY

SEQ ID NO: 153 - protein, 11 aa, Artificial Sequence
  Synthetic peptide
KASQNVDTNVA

SEQ ID NO: 154 - protein, 7 aa, Artificial Sequence
  Synthetic peptide
SASYRYS

SEQ ID NO: 155 - protein, 9 aa, Artificial Sequence
  Synthetic peptide
QQYDQQLIT

SEQ ID NO: 156 - protein, 121 aa, Artificial Sequence
  Synthetic peptide
QVQLVESGGGLVKPGESLRLSCAASGFTFSDYYMYWVRQAPGKGLEWVAIISDGGYYTYYSDIIKGRFTISRDNAKNSLYLQMNSLKAEDTAVYYCARGFPLLRHGAMDYWGQGTLVTVSS

SEQ ID NO: 157 - protein, 107 aa, Artificial Sequence
  Synthetic peptide
DIQMTQSPSSLSASVGDRVTITCKASQNVDTNVAWYQQKPGQAPKSLIYSASYRYSDVPSRFSGSASGTDFTLTISSVQSEDFATYYCQQYDQQLITFGGGTKLEIK

SEQ ID NO: 158 - protein, 243 aa, Artificial Sequence
  Synthetic peptide
QVQLVESGGGLVKPGESLRLSCAASGFTFSDYYMYWVRQAPGKGLEWVAIISDGGYYTYYSDIIKGRFTISRDNAKNSLYLQMNSLKAEDTAVYYCARGFPLLRHGAMDYWGQGTLVTVSSGGGGSGGGGSGGGGSDIQMTQSPSSLSASVGDRVTITCKASQNVDTNVAWYQQKPGQAPKSLIYSASYRYSDVPSRFSGSASGTDFTLTISSVQSEDFATYYCQQYDQQLITFGGGTKLEIK

SEQ ID NO: 159 - protein, 498 aa, Artificial Sequence
  Synthetic peptide
QVQLVESGGGLVKPGESLRLSCAASGFTFSDYYMYWVRQAPGKGLEWVAIISDGGYYTYYSDIIKGRFTISRDNAKNSLYLQMNSLKAEDTAVYYCARGFPLLRHGAMDYWGQGTLVTVSSGGGGSGGGGSGGGGSDIQMTQSPSSLSASVGDRVTITCKASQNVDTNVAWYQQKPGQAPKSLIYSASYRYSDVPSRFSGSASGTDFTLTISSVQSEDFATYYCQQYDQQLITFGGGTKLEIKSGGGGSEVQLVESGGGLVQPGGSLKLSCAASGFTFNKYAMNWVRQAPGKGLEWVARIRSKYNNYATYYADSVKDRFTISRDDSKNTAYLQMNNLKTEDTAVYYCVRHGNFGNSYISYWAYWGQGTLVTVSSGGGGSGGGGSGGGGSQTVVTQEPSLTVSPGGTVTLTCGSSTGAVTSGNYPNWVQQKPGQAPRGLIGGTKFLAPGTPARFSGSLLGGKAALTLSGVQPEDEAEYYCVLWYSNRWVFGGGTKLTVL

SEQ ID NO: 160 - protein, 986 aa, Artificial Sequence
  Synthetic peptide
QVQLVESGGGLVKPGESLRLSCAASGFTFSDYYMYWVRQAPGKGLEWVAIISDGGYYTYYSDIIKGRFTISRDNAKNSLYLQMNSLKAEDTAVYYCARGFPLLRHGAMDYWGQGTLVTVSSGGGGSGGGGSGGGGSDIQMTQSPSSLSASVGDRVTITCKASQNVDTNVAWYQQKPGQAPKSLIYSASYRYSDVPSRFSGSASGTDFTLTISSVQSEDFATYYCQQYDQQLITFGGGTKLEIKSGGGGSEVQLVESGGGLVQPGGSLKLSCAASGFTFNKYAMNWVRQAPGKGLEWVARIRSKYNNYATYYADSVKDRFTISRDDSKNTAYLQMNNLKTEDTAVYYCVRHGNFGNSYISYWAYWGQGTLVTVSSGGGGSGGGGSGGGGSQTVVTQEPSLTVSPGGTVTLTCGSSTGAVTSGNYPNWVQQKPGQAPRGLIGGTKFLAPGTPARFSGSLLGGKAALTLSGVQPEDEAEYYCVLWYSNRWVFGGGTKLTVLGGGGDKTHTCPPCPAPELLGGPSVFLFPPKPKDTLMISRTPEVTCVVVDVSHEDPEVKFNWYVDGVEVHNAKTKPCEEQYGSTYRCVSVLTVLHQDWLNGKEYKCKVSNKALPAPIEKTISKAKGQPREPQVYTLPPSREEMTKNQVSLTCLVKGFYPSDIAVEWESNGQPENNYKTTPPVLDSDGSFFLYSKLTVDKSRWQQGNVFSCSVMHEALHNHYTQKSLSLSPGKGGGGSGGGGSGGGGSGGGGSGGGGSGGGGSDKTHTCPPCPAPELLGGPSVFLFPPKPKDTLMISRTPEVTCVVVDVSHEDPEVKFNWYVDGVEVHNAKTKPCEEQYGSTYRCVSVLTVLHQDWLNGKEYKCKVSNKALPAPIEKTISKAKGQPREPQVYTLPPSREEMTKNQVSLTCLVKGFYPSDIAVEWESNGQPENNYKTTPPVLDSDGSFFLYSKLTVDKSRWQQGNVFSCSVMHEALHNHYTQKSLSLSPGK

SEQ ID NO: 161 - protein, 984 aa, Artificial Sequence
  Synthetic peptide
QVQLVESGGGLVKPGESLRLSCAASGFTFSDYYMYWVRQAPGKGLEWVAIISDGGYYTYYSDIIKGRFTISRDNAKNSLYLQMNSLKAEDTAVYYCARGFPLLRHGAMDYWGQGTLVTVSSGGGGSGGGGSGGGGSDIQMTQSPSSLSASVGDRVTITCKASQNVDTNVAWYQQKPGQAPKSLIYSASYRYSDVPSRFSGSASGTDFTLTISSVQSEDFATYYCQQYDQQLITFGGGTKLEIKSGGGGSEVQLVESGGGLVQPGGSLKLSCAASGFTFNKYAMNWVRQAPGKGLEWVARIRSKYNNYATYYADSVKDRFTISRDDSKNTAYLQMNNLKTEDTAVYYCVRHGNFGNSYISYWAYWGQGTLVTVSSGGGGSGGGGSGGGGSQTVVTQEPSLTVSPGGTVTLTCGSSTGAVTSGNYPNWVQQKPGQAPRGLIGGTKFLAPGTPARFSGSLLGGKAALTLSGVQPEDEAEYYCVLWYSNRWVFGGGTKLTVLGGGGDKTHTCPPCPAPELLGGPSVFLFPPKPKDTLMISRTPEVTCVVVDVSHEDPEVKFNWYVDGVEVHNAKTKPCEEQYGSTYRCVSVLTVLHQDWLNGKEYKCKVSNKALPAPIEKTISKAKGQPREPQVYTLPPSREEMTKNQVSLTCLVKGFYPSDIAVEWESNGQPENNYKTTPPVLDSDGSFFLYSKLTVDKSRWQQGNVFSCSVMHEALHNHYTQKSLSLSPGGGGSGGGGSGGGGSGGGGSGGGGSGGGGSDKTHTCPPCPAPELLGGPSVFLFPPKPKDTLMISRTPEVTCVVVDVSHEDPEVKFNWYVDGVEVHNAKTKPCEEQYGSTYRCVSVLTVLHQDWLNGKEYKCKVSNKALPAPIEKTISKAKGQPREPQVYTLPPSREEMTKNQVSLTCLVKGFYPSDIAVEWESNGQPENNYKTTPPVLDSDGSFFLYSKLTVDKSRWQQGNVFSCSVMHEALHNHYTQKSLSLSPGK

SEQ ID NO: 162 - protein, 121 aa, Artificial Sequence
  Synthetic peptide
QVQLVESGGGLVKPGESLRLSCAASGFTFSDYYMYWVRQAPGKCLEWVAIISDGGYYTYYSDIIKGRFTISRDNAKNSLYLQMNSLKAEDTAVYYCARGFPLLRHGAMDYWGQGTLVTVSS

SEQ ID NO: 163 - protein, 107 aa, Artificial Sequence
  Synthetic peptide
DIQMTQSPSSLSASVGDRVTITCKASQNVDTNVAWYQQKPGQAPKSLIYSASYRYSDVPSRFSGSASGTDFTLTISSVQSEDFATYYCQQYDQQLITFGCGTKLEIK

SEQ ID NO: 164 - protein, 243 aa, Artificial Sequence
  Synthetic peptide
QVQLVESGGGLVKPGESLRLSCAASGFTFSDYYMYWVRQAPGKCLEWVAIISDGGYYTYYSDIIKGRFTISRDNAKNSLYLQMNSLKAEDTAVYYCARGFPLLRHGAMDYWGQGTLVTVSSGGGGSGGGGSGGGGSDIQMTQSPSSLSASVGDRVTITCKASQNVDTNVAWYQQKPGQAPKSLIYSASYRYSDVPSRFSGSASGTDFTLTISSVQSEDFATYYCQQYDQQLITFGCGTKLEIK

SEQ ID NO: 165 - protein, 498 aa, Artificial Sequence
  Synthetic peptide
QVQLVESGGGLVKPGESLRLSCAASGFTFSDYYMYWVRQAPGKCLEWVAIISDGGYYTYYSDIIKGRFTISRDNAKNSLYLQMNSLKAEDTAVYYCARGFPLLRHGAMDYWGQGTLVTVSSGGGGSGGGGSGGGGSDIQMTQSPSSLSASVGDRVTITCKASQNVDTNVAWYQQKPGQAPKSLIYSASYRYSDVPSRFSGSASGTDFTLTISSVQSEDFATYYCQQYDQQLITFGCGTKLEIKSGGGGSEVQLVESGGGLVQPGGSLKLSCAASGFTFNKYAMNWVRQAPGKGLEWVARIRSKYNNYATYYADSVKDRFTISRDDSKNTAYLQMNNLKTEDTAVYYCVRHGNFGNSYISYWAYWGQGTLVTVSSGGGGSGGGGSGGGGSQTVVTQEPSLTVSPGGTVTLTCGSSTGAVTSGNYPNWVQQKPGQAPRGLIGGTKFLAPGTPARFSGSLLGGKAALTLSGVQPEDEAEYYCVLWYSNRWVFGGGTKLTVL

SEQ ID NO: 166 - protein, 986 aa, Artificial Sequence
  Synthetic peptide
QVQLVESGGGLVKPGESLRLSCAASGFTFSDYYMYWVRQAPGKCLEWVAIISDGGYYTYYSDIIKGRFTISRDNAKNSLYLQMNSLKAEDTAVYYCARGFPLLRHGAMDYWGQGTLVTVSSGGGGSGGGGSGGGGSDIQMTQSPSSLSASVGDRVTITCKASQNVDTNVAWYQQKPGQAPKSLIYSASYRYSDVPSRFSGSASGTDFTLTISSVQSEDFATYYCQQYDQQLITFGCGTKLEIKSGGGGSEVQLVESGGGLVQPGGSLKLSCAASGFTFNKYAMNWVRQAPGKGLEWVARIRSKYNNYATYYADSVKDRFTISRDDSKNTAYLQMNNLKTEDTAVYYCVRHGNFGNSYISYWAYWGQGTLVTVSSGGGGSGGGGSGGGGSQTVVTQEPSLTVSPGGTVTLTCGSSTGAVTSGNYPNWVQQKPGQAPRGLIGGTKFLAPGTPARFSGSLLGGKAALTLSGVQPEDEAEYYCVLWYSNRWVFGGGTKLTVLGGGGDKTHTCPPCPAPELLGGPSVFLFPPKPKDTLMISRTPEVTCVVVDVSHEDPEVKFNWYVDGVEVHNAKTKPCEEQYGSTYRCVSVLTVLHQDWLNGKEYKCKVSNKALPAPIEKTISKAKGQPREPQVYTLPPSREEMTKNQVSLTCLVKGFYPSDIAVEWESNGQPENNYKTTPPVLDSDGSFFLYSKLTVDKSRWQQGNVFSCSVMHEALHNHYTQKSLSLSPGKGGGGSGGGGSGGGGSGGGGSGGGGSGGGGSDKTHTCPPCPAPELLGGPSVFLFPPKPKDTLMISRTPEVTCVVVDVSHEDPEVKFNWYVDGVEVHNAKTKPCEEQYGSTYRCVSVLTVLHQDWLNGKEYKCKVSNKALPAPIEKTISKAKGQPREPQVYTLPPSREEMTKNQVSLTCLVKGFYPSDIAVEWESNGQPENNYKTTPPVLDSDGSFFLYSKLTVDKSRWQQGNVFSCSVMHEALHNHYTQKSLSLSPGK

SEQ ID NO: 167 - protein, 984 aa, Artificial Sequence
  Synthetic peptide
QVQLVESGGGLVKPGESLRLSCAASGFTFSDYYMYWVRQAPGKCLEWVAIISDGGYYTYYSDIIKGRFTISRDNAKNSLYLQMNSLKAEDTAVYYCARGFPLLRHGAMDYWGQGTLVTVSSGGGGSGGGGSGGGGSDIQMTQSPSSLSASVGDRVTITCKASQNVDTNVAWYQQKPGQAPKSLIYSASYRYSDVPSRFSGSASGTDFTLTISSVQSEDFATYYCQQYDQQLITFGCGTKLEIKSGGGGSEVQLVESGGGLVQPGGSLKLSCAASGFTFNKYAMNWVRQAPGKGLEWVARIRSKYNNYATYYADSVKDRFTISRDDSKNTAYLQMNNLKTEDTAVYYCVRHGNFGNSYISYWAYWGQGTLVTVSSGGGGSGGGGSGGGGSQTVVTQEPSLTVSPGGTVTLTCGSSTGAVTSGNYPNWVQQKPGQAPRGLIGGTKFLAPGTPARFSGSLLGGKAALTLSGVQPEDEAEYYCVLWYSNRWVFGGGTKLTVLGGGGDKTHTCPPCPAPELLGGPSVFLFPPKPKDTLMISRTPEVTCVVVDVSHEDPEVKFNWYVDGVEVHNAKTKPCEEQYGSTYRCVSVLTVLHQDWLNGKEYKCKVSNKALPAPIEKTISKAKGQPREPQVYTLPPSREEMTKNQVSLTCLVKGFYPSDIAVEWESNGQPENNYKTTPPVLDSDGSFFLYSKLTVDKSRWQQGNVFSCSVMHEALHNHYTQKSLSLSPGGGGSGGGGSGGGGSGGGGSGGGGSGGGGSDKTHTCPPCPAPELLGGPSVFLFPPKPKDTLMISRTPEVTCVVVDVSHEDPEVKFNWYVDGVEVHNAKTKPCEEQYGSTYRCVSVLTVLHQDWLNGKEYKCKVSNKALPAPIEKTISKAKGQPREPQVYTLPPSREEMTKNQVSLTCLVKGFYPSDIAVEWESNGQPENNYKTTPPVLDSDGSFFLYSKLTVDKSRWQQGNVFSCSVMHEALHNHYTQKSLSLSPGK

SEQ ID NO: 168 - protein, 5 aa, Artificial Sequence
  Synthetic peptide
DYYMY

SEQ ID NO: 169 - protein, 17 aa, Artificial Sequence
  Synthetic peptide
IISDGGYYTYYSDIIKG

SEQ ID NO: 170 - protein, 12 aa, Artificial Sequence
  Synthetic peptide
GFPLLRHGAMDY

SEQ ID NO: 171 - protein, 11 aa, Artificial Sequence
  Synthetic peptide
KASQNVDTNVA

SEQ ID NO: 172 - protein, 7 aa, Artificial Sequence
  Synthetic peptide
SASYRYS

SEQ ID NO: 173 - protein, 9 aa, Artificial Sequence
  Synthetic peptide
QQYDQVRLT

SEQ ID NO: 174 - protein, 121 aa, Artificial Sequence; identical to SEQ ID NO: 156
  Synthetic peptide

SEQ ID NO: 175 - protein, 107 aa, Artificial Sequence
  Synthetic peptide
DIQMTQSPSSLSASVGDRVTITCKASQNVDTNVAWYQQKPGQAPKSLIYSASYRYSDVPSRFSGSASGTDFTLTISSVQSEDFATYYCQQYDQVRLTFGGGTKLEIK

SEQ ID NO: 176 - protein, 243 aa, Artificial Sequence
  Synthetic peptide
QVQLVESGGGLVKPGESLRLSCAASGFTFSDYYMYWVRQAPGKGLEWVAIISDGGYYTYYSDIIKGRFTISRDNAKNSLYLQMNSLKAEDTAVYYCARGFPLLRHGAMDYWGQGTLVTVSSGGGGSGGGGSGGGGSDIQMTQSPSSLSASVGDRVTITCKASQNVDTNVAWYQQKPGQAPKSLIYSASYRYSDVPSRFSGSASGTDFTLTISSVQSEDFATYYCQQYDQVRLTFGGGTKLEIK

SEQ ID NO: 177 - protein, 498 aa, Artificial Sequence
  Synthetic peptide
QVQLVESGGGLVKPGESLRLSCAASGFTFSDYYMYWVRQAPGKGLEWVAIISDGGYYTYYSDIIKGRFTISRDNAKNSLYLQMNSLKAEDTAVYYCARGFPLLRHGAMDYWGQGTLVTVSSGGGGSGGGGSGGGGSDIQMTQSPSSLSASVGDRVTITCKASQNVDTNVAWYQQKPGQAPKSLIYSASYRYSDVPSRFSGSASGTDFTLTISSVQSEDFATYYCQQYDQVRLTFGGGTKLEIKSGGGGSEVQLVESGGGLVQPGGSLKLSCAASGFTFNKYAMNWVRQAPGKGLEWVARIRSKYNNYATYYADSVKDRFTISRDDSKNTAYLQMNNLKTEDTAVYYCVRHGNFGNSYISYWAYWGQGTLVTVSSGGGGSGGGGSGGGGSQTVVTQEPSLTVSPGGTVTLTCGSSTGAVTSGNYPNWVQQKPGQAPRGLIGGTKFLAPGTPARFSGSLLGGKAALTLSGVQPEDEAEYYCVLWYSNRWVFGGGTKLTVL

SEQ ID NO: 178 - protein, 986 aa, Artificial Sequence
  Synthetic peptide
QVQLVESGGGLVKPGESLRLSCAASGFTFSDYYMYWVRQAPGKGLEWVAIISDGGYYTYYSDIIKGRFTISRDNAKNSLYLQMNSLKAEDTAVYYCARGFPLLRHGAMDYWGQGTLVTVSSGGGGSGGGGSGGGGSDIQMTQSPSSLSASVGDRVTITCKASQNVDTNVAWYQQKPGQAPKSLIYSASYRYSDVPSRFSGSASGTDFTLTISSVQSEDFATYYCQQYDQVRLTFGGGTKLEIKSGGGGSEVQLVESGGGLVQPGGSLKLSCAASGFTFNKYAMNWVRQAPGKGLEWVARIRSKYNNYATYYADSVKDRFTISRDDSKNTAYLQMNNLKTEDTAVYYCVRHGNFGNSYISYWAYWGQGTLVTVSSGGGGSGGGGSGGGGSQTVVTQEPSLTVSPGGTVTLTCGSSTGAVTSGNYPNWVQQKPGQAPRGLIGGTKFLAPGTPARFSGSLLGGKAALTLSGVQPEDEAEYYCVLWYSNRWVFGGGTKLTVLGGGGDKTHTCPPCPAPELLGGPSVFLFPPKPKDTLMISRTPEVTCVVVDVSHEDPEVKFNWYVDGVEVHNAKTKPCEEQYGSTYRCVSVLTVLHQDWLNGKEYKCKVSNKALPAPIEKTISKAKGQPREPQVYTLPPSREEMTKNQVSLTCLVKGFYPSDIAVEWESNGQPENNYKTTPPVLDSDGSFFLYSKLTVDKSRWQQGNVFSCSVMHEALHNHYTQKSLSLSPGKGGGGSGGGGSGGGGSGGGGSGGGGSGGGGSDKTHTCPPCPAPELLGGPSVFLFPPKPKDTLMISRTPEVTCVVVDVSHEDPEVKFNWYVDGVEVHNAKTKPCEEQYGSTYRCVSVLTVLHQDWLNGKEYKCKVSNKALPAPIEKTISKAKGQPREPQVYTLPPSREEMTKNQVSLTCLVKGFYPSDIAVEWESNGQPENNYKTTPPVLDSDGSFFLYSKLTVDKSRWQQGNVFSCSVMHEALHNHYTQKSLSLSPGK

SEQ ID NO: 179 - protein, 984 aa, Artificial Sequence
  Synthetic peptide
QVQLVESGGGLVKPGESLRLSCAASGFTFSDYYMYWVRQAPGKGLEWVAIISDGGYYTYYSDIIKGRFTISRDNAKNSLYLQMNSLKAEDTAVYYCARGFPLLRHGAMDYWGQGTLVTVSSGGGGSGGGGSGGGGSDIQMTQSPSSLSASVGDRVTITCKASQNVDTNVAWYQQKPGQAPKSLIYSASYRYSDVPSRFSGSASGTDFTLTISSVQSEDFATYYCQQYDQVRLTFGGGTKLEIKSGGGGSEVQLVESGGGLVQPGGSLKLSCAASGFTFNKYAMNWVRQAPGKGLEWVARIRSKYNNYATYYADSVKDRFTISRDDSKNTAYLQMNNLKTEDTAVYYCVRHGNFGNSYISYWAYWGQGTLVTVSSGGGGSGGGGSGGGGSQTVVTQEPSLTVSPGGTVTLTCGSSTGAVTSGNYPNWVQQKPGQAPRGLIGGTKFLAPGTPARFSGSLLGGKAALTLSGVQPEDEAEYYCVLWYSNRWVFGGGTKLTVLGGGGDKTHTCPPCPAPELLGGPSVFLFPPKPKDTLMISRTPEVTCVVVDVSHEDPEVKFNWYVDGVEVHNAKTKPCEEQYGSTYRCVSVLTVLHQDWLNGKEYKCKVSNKALPAPIEKTISKAKGQPREPQVYTLPPSREEMTKNQVSLTCLVKGFYPSDIAVEWESNGQPENNYKTTPPVLDSDGSFFLYSKLTVDKSRWQQGNVFSCSVMHEALHNHYTQKSLSLSPGGGGSGGGGSGGGGSGGGGSGGGGSGGGGSDKTHTCPPCPAPELLGGPSVFLFPPKPKDTLMISRTPEVTCVVVDVSHEDPEVKFNWYVDGVEVHNAKTKPCEEQYGSTYRCVSVLTVLHQDWLNGKEYKCKVSNKALPAPIEKTISKAKGQPREPQVYTLPPSREEMTKNQVSLTCLVKGFYPSDIAVEWESNGQPENNYKTTPPVLDSDGSFFLYSKLTVDKSRWQQGNVFSCSVMHEALHNHYTQKSLSLSPGK

SEQ ID NO: 180 - protein, 121 aa, Artificial Sequence; identical to SEQ ID NO: 162
  Synthetic peptide

SEQ ID NO: 181 - protein, 107 aa, Artificial Sequence
  Synthetic peptide
DIQMTQSPSSLSASVGDRVTITCKASQNVDTNVAWYQQKPGQAPKSLIYSASYRYSDVPSRFSGSASGTDFTLTISSVQSEDFATYYCQQYDQVRLTFGCGTKLEIK

SEQ ID NO: 182 - protein, 243 aa, Artificial Sequence
  Synthetic peptide
QVQLVESGGGLVKPGESLRLSCAASGFTFSDYYMYWVRQAPGKCLEWVAIISDGGYYTYYSDIIKGRFTISRDNAKNSLYLQMNSLKAEDTAVYYCARGFPLLRHGAMDYWGQGTLVTVSSGGGGSGGGGSGGGGSDIQMTQSPSSLSASVGDRVTITCKASQNVDTNVAWYQQKPGQAPKSLIYSASYRYSDVPSRFSGSASGTDFTLTISSVQSEDFATYYCQQYDQVRLTFGCGTKLEIK

SEQ ID NO: 183 - protein, 498 aa, Artificial Sequence
  Synthetic peptide
QVQLVESGGGLVKPGESLRLSCAASGFTFSDYYMYWVRQAPGKCLEWVAIISDGGYYTYYSDIIKGRFTISRDNAKNSLYLQMNSLKAEDTAVYYCARGFPLLRHGAMDYWGQGTLVTVSSGGGGSGGGGSGGGGSDIQMTQSPSSLSASVGDRVTITCKASQNVDTNVAWYQQKPGQAPKSLIYSASYRYSDVPSRFSGSASGTDFTLTISSVQSEDFATYYCQQYDQVRLTFGCGTKLEIKSGGGGSEVQLVESGGGLVQPGGSLKLSCAASGFTFNKYAMNWVRQAPGKGLEWVARIRSKYNNYATYYADSVKDRFTISRDDSKNTAYLQMNNLKTEDTAVYYCVRHGNFGNSYISYWAYWGQGTLVTVSSGGGGSGGGGSGGGGSQTVVTQEPSLTVSPGGTVTLTCGSSTGAVTSGNYPNWVQQKPGQAPRGLIGGTKFLAPGTPARFSGSLLGGKAALTLSGVQPEDEAEYYCVLWYSNRWVFGGGTKLTVL

SEQ ID NO: 184 - protein, 986 aa, Artificial Sequence
  Synthetic peptide
QVQLVESGGGLVKPGESLRLSCAASGFTFSDYYMYWVRQAPGKCLEWVAIISDGGYYTYYSDIIKGRFTISRDNAKNSLYLQMNSLKAEDTAVYYCARGFPLLRHGAMDYWGQGTLVTVSSGGGGSGGGGSGGGGSDIQMTQSPSSLSASVGDRVTITCKASQNVDTNVAWYQQKPGQAPKSLIYSASYRYSDVPSRFSGSASGTDFTLTISSVQSEDFATYYCQQYDQVRLTFGCGTKLEIKSGGGGSEVQLVESGGGLVQPGGSLKLSCAASGFTFNKYAMNWVRQAPGKGLEWVARIRSKYNNYATYYADSVKDRFTISRDDSKNTAYLQMNNLKTEDTAVYYCVRHGNFGNSYISYWAYWGQGTLVTVSSGGGGSGGGGSGGGGSQTVVTQEPSLTVSPGGTVTLTCGSSTGAVTSGNYPNWVQQKPGQAPRGLIGGTKFLAPGTPARFSGSLLGGKAALTLSGVQPEDEAEYYCVLWYSNRWVFGGGTKLTVLGGGGDKTHTCPPCPAPELLGGPSVFLFPPKPKDTLMISRTPEVTCVVVDVSHEDPEVKFNWYVDGVEVHNAKTKPCEEQYGSTYRCVSVLTVLHQDWLNGKEYKCKVSNKALPAPIEKTISKAKGQPREPQVYTLPPSREEMTKNQVSLTCLVKGFYPSDIAVEWESNGQPENNYKTTPPVLDSDGSFFLYSKLTVDKSRWQQGNVFSCSVMHEALHNHYTQKSLSLSPGKGGGGSGGGGSGGGGSGGGGSGGGGSGGGGSDKTHTCPPCPAPELLGGPSVFLFPPKPKDTLMISRTPEVTCVVVDVSHEDPEVKFNWYVDGVEVHNAKTKPCEEQYGSTYRCVSVLTVLHQDWLNGKEYKCKVSNKALPAPIEKTISKAKGQPREPQVYTLPPSREEMTKNQVSLTCLVKGFYPSDIAVEWESNGQPENNYKTTPPVLDSDGSFFLYSKLTVDKSRWQQGNVFSCSVMHEALHNHYTQKSLSLSPGK

SEQ ID NO: 185 - protein, 984 aa, Artificial Sequence
  Synthetic peptide
QVQLVESGGGLVKPGESLRLSCAASGFTFSDYYMYWVRQAPGKCLEWVAIISDGGYYTYYSDIIKGRFTISRDNAKNSLYLQMNSLKAEDTAVYYCARGFPLLRHGAMDYWGQGTLVTVSSGGGGSGGGGSGGGGSDIQMTQSPSSLSASVGDRVTITCKASQNVDTNVAWYQQKPGQAPKSLIYSASYRYSDVPSRFSGSASGTDFTLTISSVQSEDFATYYCQQYDQVRLTFGCGTKLEIKSGGGGSEVQLVESGGGLVQPGGSLKLSCAASGFTFNKYAMNWVRQAPGKGLEWVARIRSKYNNYATYYADSVKDRFTISRDDSKNTAYLQMNNLKTEDTAVYYCVRHGNFGNSYISYWAYWGQGTLVTVSSGGGGSGGGGSGGGGSQTVVTQEPSLTVSPGGTVTLTCGSSTGAVTSGNYPNWVQQKPGQAPRGLIGGTKFLAPGTPARFSGSLLGGKAALTLSGVQPEDEAEYYCVLWYSNRWVFGGGTKLTVLGGGGDKTHTCPPCPAPELLGGPSVFLFPPKPKDTLMISRTPEVTCVVVDVSHEDPEVKFNWYVDGVEVHNAKTKPCEEQYGSTYRCVSVLTVLHQDWLNGKEYKCKVSNKALPAPIEKTISKAKGQPREPQVYTLPPSREEMTKNQVSLTCLVKGFYPSDIAVEWESNGQPENNYKTTPPVLDSDGSFFLYSKLTVDKSRWQQGNVFSCSVMHEALHNHYTQKSLSLSPGGGGSGGGGSGGGGSGGGGSGGGGSGGGGSDKTHTCPPCPAPELLGGPSVFLFPPKPKDTLMISRTPEVTCVVVDVSHEDPEVKFNWYVDGVEVHNAKTKPCEEQYGSTYRCVSVLTVLHQDWLNGKEYKCKVSNKALPAPIEKTISKAKGQPREPQVYTLPPSREEMTKNQVSLTCLVKGFYPSDIAVEWESNGQPENNYKTTPPVLDSDGSFFLYSKLTVDKSRWQQGNVFSCSVMHEALHNHYTQKSLSLSPGK

SEQ ID NO: 186 - protein, 5 aa, Artificial Sequence
  Synthetic peptide
DYYMN

SEQ ID NO: 187 - protein, 17 aa, Artificial Sequence
  Synthetic peptide
IISDGGYYTYYSDIIKG

SEQ ID NO: 188 - protein, 12 aa, Artificial Sequence
  Synthetic peptide
GFPLLRHGAMDY

SEQ ID NO: 189 - protein, 11 aa, Artificial Sequence
  Synthetic peptide
KASQNVDTNVA

SEQ ID NO: 190 - protein, 7 aa, Artificial Sequence
  Synthetic peptide
SASYRYS

SEQ ID NO: 191 - protein, 9 aa, Artificial Sequence
  Synthetic peptide
QQYDDLRPT

SEQ ID NO: 192 - protein, 121 aa, Artificial Sequence; identical to SEQ ID NO: 48
  Synthetic peptide

SEQ ID NO: 193 - protein, 107 aa, Artificial Sequence; identical to SEQ ID NO: 85
  Synthetic peptide

SEQ ID NO: 194 - protein, 243 aa, Artificial Sequence
  Synthetic peptide
QVQLVESGGGLVKPGESLRLSCAASGFTFSDYYMNWVRQAPGKGLEWVAIISDGGYYTYYSDIIKGRFTISRDNAKNSLYLQMNSLKAEDTAVYYCARGFPLLRHGAMDYWGQGTLVTVSSGGGGSGGGGSGGGGSDIQMTQSPSSLSASVGDRVTITCKASQNVDTNVAWYQQKPGQAPKSLIYSASYRYSDVPSRFSGSASGTDFTLTISSLQSEDFATYYCQQYDDLRPTFGGGTKLEIK

SEQ ID NO: 195 - protein, 498 aa, Artificial Sequence
  Synthetic peptide
QVQLVESGGGLVKPGESLRLSCAASGFTFSDYYMNWVRQAPGKGLEWVAIISDGGYYTYYSDIIKGRFTISRDNAKNSLYLQMNSLKAEDTAVYYCARGFPLLRHGAMDYWGQGTLVTVSSGGGGSGGGGSGGGGSDIQMTQSPSSLSASVGDRVTITCKASQNVDTNVAWYQQKPGQAPKSLIYSASYRYSDVPSRFSGSASGTDFTLTISSLQSEDFATYYCQQYDDLRPTFGGGTKLEIKSGGGGSEVQLVESGGGLVQPGGSLKLSCAASGFTFNKYAMNWVRQAPGKGLEWVARIRSKYNNYATYYADSVKDRFTISRDDSKNTAYLQMNNLKTEDTAVYYCVRHGNFGNSYISYWAYWGQGTLVTVSSGGGGSGGGGSGGGGSQTVVTQEPSLTVSPGGTVTLTCGSSTGAVTSGNYPNWVQQKPGQAPRGLIGGTKFLAPGTPARFSGSLLGGKAALTLSGVQPEDEAEYYCVLWYSNRWVFGGGTKLTVL

SEQ ID NO: 196 - protein, 986 aa, Artificial Sequence
  Synthetic peptide
QVQLVESGGGLVKPGESLRLSCAASGFTFSDYYMNWVRQAPGKGLEWVAIISDGGYYTYYSDIIKGRFTISRDNAKNSLYLQMNSLKAEDTAVYYCARGFPLLRHGAMDYWGQGTLVTVSSGGGGSGGGGSGGGGSDIQMTQSPSSLSASVGDRVTITCKASQNVDTNVAWYQQKPGQAPKSLIYSASYRYSDVPSRFSGSASGTDFTLTISSLQSEDFATYYCQQYDDLRPTFGGGTKLEIKSGGGGSEVQLVESGGGLVQPGGSLKLSCAASGFTFNKYAMNWVRQAPGKGLEWVARIRSKYNNYATYYADSVKDRFTISRDDSKNTAYLQMNNLKTEDTAVYYCVRHGNFGNSYISYWAYWGQGTLVTVSSGGGGSGGGGSGGGGSQTVVTQEPSLTVSPGGTVTLTCGSSTGAVTSGNYPNWVQQKPGQAPRGLIGGTKFLAPGTPARFSGSLLGGKAALTLSGVQPEDEAEYYCVLWYSNRWVFGGGTKLTVLGGGGDKTHTCPPCPAPELLGGPSVFLFPPKPKDTLMISRTPEVTCVVVDVSHEDPEVKFNWYVDGVEVHNAKTKPCEEQYGSTYRCVSVLTVLHQDWLNGKEYKCKVSNKALPAPIEKTISKAKGQPREPQVYTLPPSREEMTKNQVSLTCLVKGFYPSDIAVEWESNGQPENNYKTTPPVLDSDGSFFLYSKLTVDKSRWQQGNVFSCSVMHEALHNHYTQKSLSLSPGKGGGGSGGGGSGGGGSGGGGSGGGGSGGGGSDKTHTCPPCPAPELLGGPSVFLFPPKPKDTLMISRTPEVTCVVVDVSHEDPEVKFNWYVDGVEVHNAKTKPCEEQYGSTYRCVSVLTVLHQDWLNGKEYKCKVSNKALPAPIEKTISKAKGQPREPQVYTLPPSREEMTKNQVSLTCLVKGFYPSDIAVEWESNGQPENNYKTTPPVLDSDGSFFLYSKLTVDKSRWQQGNVFSCSVMHEALHNHYTQKSLSLSPGK

SEQ ID NO: 197 - protein, 984 aa, Artificial Sequence
  Synthetic peptide
QVQLVESGGGLVKPGESLRLSCAASGFTFSDYYMNWVRQAPGKGLEWVAIISDGGYYTYYSDIIKGRFTISRDNAKNSLYLQMNSLKAEDTAVYYCARGFPLLRHGAMDYWGQGTLVTVSSGGGGSGGGGSGGGGSDIQMTQSPSSLSASVGDRVTITCKASQNVDTNVAWYQQKPGQAPKSLIYSASYRYSDVPSRFSGSASGTDFTLTISSLQSEDFATYYCQQYDDLRPTFGGGTKLEIKSGGGGSEVQLVESGGGLVQPGGSLKLSCAASGFTFNKYAMNWVRQAPGKGLEWVARIRSKYNNYATYYADSVKDRFTISRDDSKNTAYLQMNNLKTEDTAVYYCVRHGNFGNSYISYWAYWGQGTLVTVSSGGGGSGGGGSGGGGSQTVVTQEPSLTVSPGGTVTLTCGSSTGAVTSGNYPNWVQQKPGQAPRGLIGGTKFLAPGTPARFSGSLLGGKAALTLSGVQPEDEAEYYCVLWYSNRWVFGGGTKLTVLGGGGDKTHTCPPCPAPELLGGPSVFLFPPKPKDTLMISRTPEVTCVVVDVSHEDPEVKFNWYVDGVEVHNAKTKPCEEQYGSTYRCVSVLTVLHQDWLNGKEYKCKVSNKALPAPIEKTISKAKGQPREPQVYTLPPSREEMTKNQVSLTCLVKGFYPSDIAVEWESNGQPENNYKTTPPVLDSDGSFFLYSKLTVDKSRWQQGNVFSCSVMHEALHNHYTQKSLSLSPGGGGSGGGGSGGGGSGGGGSGGGGSGGGGSDKTHTCPPCPAPELLGGPSVFLFPPKPKDTLMISRTPEVTCVVVDVSHEDPEVKFNWYVDGVEVHNAKTKPCEEQYGSTYRCVSVLTVLHQDWLNGKEYKCKVSNKALPAPIEKTISKAKGQPREPQVYTLPPSREEMTKNQVSLTCLVKGFYPSDIAVEWESNGQPENNYKTTPPVLDSDGSFFLYSKLTVDKSRWQQGNVFSCSVMHEALHNHYTQKSLSLSPGK

SEQ ID NO: 198 - protein, 121 aa, Artificial Sequence; identical to SEQ ID NO: 54
  Synthetic peptide

SEQ ID NO: 199 - protein, 107 aa, Artificial Sequence; identical to SEQ ID NO: 91
  Synthetic peptide

SEQ ID NO: 200 - protein, 243 aa, Artificial Sequence
  Synthetic peptide
QVQLVESGGGLVKPGESLRLSCAASGFTFSDYYMNWVRQAPGKCLEWVAIISDGGYYTYYSDIIKGRFTISRDNAKNSLYLQMNSLKAEDTAVYYCARGFPLLRHGAMDYWGQGTLVTVSSGGGGSGGGGSGGGGSDIQMTQSPSSLSASVGDRVTITCKASQNVDTNVAWYQQKPGQAPKSLIYSASYRYSDVPSRFSGSASGTDFTLTISSLQSEDFATYYCQQYDDLRPTFGCGTKLEIK

SEQ ID NO: 201 - protein, 498 aa, Artificial Sequence
  Synthetic peptide
QVQLVESGGGLVKPGESLRLSCAASGFTFSDYYMNWVRQAPGKCLEWVAIISDGGYYTYYSDIIKGRFTISRDNAKNSLYLQMNSLKAEDTAVYYCARGFPLLRHGAMDYWGQGTLVTVSSGGGGSGGGGSGGGGSDIQMTQSPSSLSASVGDRVTITCKASQNVDTNVAWYQQKPGQAPKSLIYSASYRYSDVPSRFSGSASGTDFTLTISSLQSEDFATYYCQQYDDLRPTFGCGTKLEIKSGGGGSEVQLVESGGGLVQPGGSLKLSCAASGFTFNKYAMNWVRQAPGKGLEWVARIRSKYNNYATYYADSVKDRFTISRDDSKNTAYLQMNNLKTEDTAVYYCVRHGNFGNSYISYWAYWGQGTLVTVSSGGGGSGGGGSGGGGSQTVVTQEPSLTVSPGGTVTLTCGSSTGAVTSGNYPNWVQQKPGQAPRGLIGGTKFLAPGTPARFSGSLLGGKAALTLSGVQPEDEAEYYCVLWYSNRWVFGGGTKLTVL

SEQ ID NO: 202 - protein, 986 aa, Artificial Sequence
  Synthetic peptide
QVQLVESGGGLVKPGESLRLSCAASGFTFSDYYMNWVRQAPGKCLEWVAIISDGGYYTYYSDIIKGRFTISRDNAKNSLYLQMNSLKAEDTAVYYCARGFPLLRHGAMDYWGQGTLVTVSSGGGGSGGGGSGGGGSDIQMTQSPSSLSASVGDRVTITCKASQNVDTNVAWYQQKPGQAPKSLIYSASYRYSDVPSRFSGSASGTDFTLTISSLQSEDFATYYCQQYDDLRPTFGCGTKLEIKSGGGGSEVQLVESGGGLVQPGGSLKLSCAASGFTFNKYAMNWVRQAPGKGLEWVARIRSKYNNYATYYADSVKDRFTISRDDSKNTAYLQMNNLKTEDTAVYYCVRHGNFGNSYISYWAYWGQGTLVTVSSGGGGSGGGGSGGGGSQTVVTQEPSLTVSPGGTVTLTCGSSTGAVTSGNYPNWVQQKPGQAPRGLIGGTKFLAPGTPARFSGSLLGGKAALTLSGVQPEDEAEYYCVLWYSNRWVFGGGTKLTVLGGGGDKTHTCPPCPAPELLGGPSVFLFPPKPKDTLMISRTPEVTCVVVDVSHEDPEVKFNWYVDGVEVHNAKTKPCEEQYGSTYRCVSVLTVLHQDWLNGKEYKCKVSNKALPAPIEKTISKAKGQPREPQVYTLPPSREEMTKNQVSLTCLVKGFYPSDIAVEWESNGQPENNYKTTPPVLDSDGSFFLYSKLTVDKSRWQQGNVFSCSVMHEALHNHYTQKSLSLSPGKGGGGSGGGGSGGGGSGGGGSGGGGSGGGGSDKTHTCPPCPAPELLGGPSVFLFPPKPKDTLMISRTPEVTCVVVDVSHEDPEVKFNWYVDGVEVHNAKTKPCEEQYGSTYRCVSVLTVLHQDWLNGKEYKCKVSNKALPAPIEKTISKAKGQPREPQVYTLPPSREEMTKNQVSLTCLVKGFYPSDIAVEWESNGQPENNYKTTPPVLDSDGSFFLYSKLTVDKSRWQQGNVFSCSVMHEALHNHYTQKSLSLSPGK

SEQ ID NO: 203 - protein, 984 aa, Artificial Sequence
  Synthetic peptide
QVQLVESGGGLVKPGESLRLSCAASGFTFSDYYMNWVRQAPGKCLEWVAIISDGGYYTYYSDIIKGRFTISRDNAKNSLYLQMNSLKAEDTAVYYCARGFPLLRHGAMDYWGQGTLVTVSSGGGGSGGGGSGGGGSDIQMTQSPSSLSASVGDRVTITCKASQNVDTNVAWYQQKPGQAPKSLIYSASYRYSDVPSRFSGSASGTDFTLTISSLQSEDFATYYCQQYDDLRPTFGCGTKLEIKSGGGGSEVQLVESGGGLVQPGGSLKLSCAASGFTFNKYAMNWVRQAPGKGLEWVARIRSKYNNYATYYADSVKDRFTISRDDSKNTAYLQMNNLKTEDTAVYYCVRHGNFGNSYISYWAYWGQGTLVTVSSGGGGSGGGGSGGGGSQTVVTQEPSLTVSPGGTVTLTCGSSTGAVTSGNYPNWVQQKPGQAPRGLIGGTKFLAPGTPARFSGSLLGGKAALTLSGVQPEDEAEYYCVLWYSNRWVFGGGTKLTVLGGGGDKTHTCPPCPAPELLGGPSVFLFPPKPKDTLMISRTPEVTCVVVDVSHEDPEVKFNWYVDGVEVHNAKTKPCEEQYGSTYRCVSVLTVLHQDWLNGKEYKCKVSNKALPAPIEKTISKAKGQPREPQVYTLPPSREEMTKNQVSLTCLVKGFYPSDIAVEWESNGQPENNYKTTPPVLDSDGSFFLYSKLTVDKSRWQQGNVFSCSVMHEALHNHYTQKSLSLSPGGGGSGGGGSGGGGSGGGGSGGGGSGGGGSDKTHTCPPCPAPELLGGPSVFLFPPKPKDTLMISRTPEVTCVVVDVSHEDPEVKFNWYVDGVEVHNAKTKPCEEQYGSTYRCVSVLTVLHQDWLNGKEYKCKVSNKALPAPIEKTISKAKGQPREPQVYTLPPSREEMTKNQVSLTCLVKGFYPSDIAVEWESNGQPENNYKTTPPVLDSDGSFFLYSKLTVDKSRWQQGNVFSCSVMHEALHNHYTQKSLSLSPGK

SEQ ID NO: 204 - protein, 5 aa, Artificial Sequence
  Synthetic peptide
DYYMY

SEQ ID NO: 205 - protein, 17 aa, Artificial Sequence
  Synthetic peptide
IISDHHHWTYYSDIIKG

SEQ ID NO: 206 - protein, 12 aa, Artificial Sequence
  Synthetic peptide
GFPLLRHGAMDY

SEQ ID NO: 207 - protein, 11 aa, Artificial Sequence
  Synthetic peptide
KASQNVDTNVA

SEQ ID NO: 208 - protein, 7 aa, Artificial Sequence
  Synthetic peptide
SASYRYS

SEQ ID NO: 209 - protein, 9 aa, Artificial Sequence
  Synthetic peptide
QQYDSYPYT

SEQ ID NO: 210 - protein, 121 aa, Artificial Sequence
  Synthetic peptide
QVQLVESGGGLVKPGESLRLSCAASGFTFSDYYMYWVRQAPGKGLEWVAIISDHHHWTYYSDIIKGRFTISRDNAKNSLYLQMNSLKAEDTAVYYCARGFPLLRHGAMDYWGQGTLVTVSS

SEQ ID NO: 211 - protein, 107 aa, Artificial Sequence; identical to SEQ ID NO: 67
  Synthetic peptide

SEQ ID NO: 212 - protein, 243 aa, Artificial Sequence
  Synthetic peptide
QVQLVESGGGLVKPGESLRLSCAASGFTFSDYYMYWVRQAPGKGLEWVAIISDHHHWTYYSDIIKGRFTISRDNAKNSLYLQMNSLKAEDTAVYYCARGFPLLRHGAMDYWGQGTLVTVSSGGGGSGGGGSGGGGSDIQMTQSPSSLSASVGDRVTITCKASQNVDTNVAWYQQKPGQAPKSLIYSASYRYSDVPSRFSGSASGTDFTLTISSVQSEDFATYYCQQYDSYPYTFGGGTKLEIK

SEQ ID NO: 213 - protein, 498 aa, Artificial Sequence
  Synthetic peptide
QVQLVESGGGLVKPGESLRLSCAASGFTFSDYYMYWVRQAPGKGLEWVAIISDHHHWTYYSDIIKGRFTISRDNAKNSLYLQMNSLKAEDTAVYYCARGFPLLRHGAMDYWGQGTLVTVSSGGGGSGGGGSGGGGSDIQMTQSPSSLSASVGDRVTITCKASQNVDTNVAWYQQKPGQAPKSLIYSASYRYSDVPSRFSGSASGTDFTLTISSVQSEDFATYYCQQYDSYPYTFGGGTKLEIKSGGGGSEVQLVESGGGLVQPGGSLKLSCAASGFTFNKYAMNWVRQAPGKGLEWVARIRSKYNNYATYYADSVKDRFTISRDDSKNTAYLQMNNLKTEDTAVYYCVRHGNFGNSYISYWAYWGQGTLVTVSSGGGGSGGGGSGGGGSQTVVTQEPSLTVSPGGTVTLTCGSSTGAVTSGNYPNWVQQKPGQAPRGLIGGTKFLAPGTPARFSGSLLGGKAALTLSGVQPEDEAEYYCVLWYSNRWVFGGGTKLTVL

SEQ ID NO: 214 - protein, 986 aa, Artificial Sequence
  Synthetic peptide
QVQLVESGGGLVKPGESLRLSCAASGFTFSDYYMYWVRQAPGKGLEWVAIISDHHHWTYYSDIIKGRFTISRDNAKNSLYLQMNSLKAEDTAVYYCARGFPLLRHGAMDYWGQGTLVTVSSGGGGSGGGGSGGGGSDIQMTQSPSSLSASVGDRVTITCKASQNVDTNVAWYQQKPGQAPKSLIYSASYRYSDVPSRFSGSASGTDFTLTISSVQSEDFATYYCQQYDSYPYTFGGGTKLEIKSGGGGSEVQLVESGGGLVQPGGSLKLSCAASGFTFNKYAMNWVRQAPGKGLEWVARIRSKYNNYATYYADSVKDRFTISRDDSKNTAYLQMNNLKTEDTAVYYCVRHGNFGNSYISYWAYWGQGTLVTVSSGGGGSGGGGSGGGGSQTVVTQEPSLTVSPGGTVTLTCGSSTGAVTSGNYPNWVQQKPGQAPRGLIGGTKFLAPGTPARFSGSLLGGKAALTLSGVQPEDEAEYYCVLWYSNRWVFGGGTKLTVLGGGGDKTHTCPPCPAPELLGGPSVFLFPPKPKDTLMISRTPEVTCVVVDVSHEDPEVKFNWYVDGVEVHNAKTKPCEEQYGSTYRCVSVLTVLHQDWLNGKEYKCKVSNKALPAPIEKTISKAKGQPREPQVYTLPPSREEMTKNQVSLTCLVKGFYPSDIAVEWESNGQPENNYKTTPPVLDSDGSFFLYSKLTVDKSRWQQGNVFSCSVMHEALHNHYTQKSLSLSPGKGGGGSGGGGSGGGGSGGGGSGGGGSGGGGSDKTHTCPPCPAPELLGGPSVFLFPPKPKDTLMISRTPEVTCVVVDVSHEDPEVKFNWYVDGVEVHNAKTKPCEEQYGSTYRCVSVLTVLHQDWLNGKEYKCKVSNKALPAPIEKTISKAKGQPREPQVYTLPPSREEMTKNQVSLTCLVKGFYPSDIAVEWESNGQPENNYKTTPPVLDSDGSFFLYSKLTVDKSRWQQGNVFSCSVMHEALHNHYTQKSLSLSPGK

SEQ ID NO: 215 - protein, 984 aa, Artificial Sequence
  Synthetic peptide
QVQLVESGGGLVKPGESLRLSCAASGFTFSDYYMYWVRQAPGKGLEWVAIISDHHHWTYYSDIIKGRFTISRDNAKNSLYLQMNSLKAEDTAVYYCARGFPLLRHGAMDYWGQGTLVTVSSGGGGSGGGGSGGGGSDIQMTQSPSSLSASVGDRVTITCKASQNVDTNVAWYQQKPGQAPKSLIYSASYRYSDVPSRFSGSASGTDFTLTISSVQSEDFATYYCQQYDSYPYTFGGGTKLEIKSGGGGSEVQLVESGGGLVQPGGSLKLSCAASGFTFNKYAMNWVRQAPGKGLEWVARIRSKYNNYATYYADSVKDRFTISRDDSKNTAYLQMNNLKTEDTAVYYCVRHGNFGNSYISYWAYWGQGTLVTVSSGGGGSGGGGSGGGGSQTVVTQEPSLTVSPGGTVTLTCGSSTGAVTSGNYPNWVQQKPGQAPRGLIGGTKFLAPGTPARFSGSLLGGKAALTLSGVQPEDEAEYYCVLWYSNRWVFGGGTKLTVLGGGGDKTHTCPPCPAPELLGGPSVFLFPPKPKDTLMISRTPEVTCVVVDVSHEDPEVKFNWYVDGVEVHNAKTKPCEEQYGSTYRCVSVLTVLHQDWLNGKEYKCKVSNKALPAPIEKTISKAKGQPREPQVYTLPPSREEMTKNQVSLTCLVKGFYPSDIAVEWESNGQPENNYKTTPPVLDSDGSFFLYSKLTVDKSRWQQGNVFSCSVMHEALHNHYTQKSLSLSPGGGGSGGGGSGGGGSGGGGSGGGGSGGGGSDKTHTCPPCPAPELLGGPSVFLFPPKPKDTLMISRTPEVTCVVVDVSHEDPEVKFNWYVDGVEVHNAKTKPCEEQYGSTYRCVSVLTVLHQDWLNGKEYKCKVSNKALPAPIEKTISKAKGQPREPQVYTLPPSREEMTKNQVSLTCLVKGFYPSDIAVEWESNGQPENNYKTTPPVLDSDGSFFLYSKLTVDKSRWQQGNVFSCSVMHEALHNHYTQKSLSLSPGK

SEQ ID NO: 216 - protein, 121 aa, Artificial Sequence
  Synthetic peptide
QVQLVESGGGLVKPGESLRLSCAASGFTFSDYYMYWVRQAPGKCLEWVAIISDHHHWTYYSDIIKGRFTISRDNAKNSLYLQMNSLKAEDTAVYYCARGFPLLRHGAMDYWGQGTLVTVSS

SEQ ID NO: 217 - protein, 107 aa, Artificial Sequence; identical to SEQ ID NO: 73
  Synthetic peptide

SEQ ID NO: 218 - protein, 243 aa, Artificial Sequence
  Synthetic peptide
QVQLVESGGGLVKPGESLRLSCAASGFTFSDYYMYWVRQAPGKCLEWVAIISDHHHWTYYSDIIKGRFTISRDNAKNSLYLQMNSLKAEDTAVYYCARGFPLLRHGAMDYWGQGTLVTVSSGGGGSGGGGSGGGGSDIQMTQSPSSLSASVGDRVTITCKASQNVDTNVAWYQQKPGQAPKSLIYSASYRYSDVPSRFSGSASGTDFTLTISSVQSEDFATYYCQQYDSYPYTFGCGTKLEIK

SEQ ID NO: 219 - protein, 498 aa, Artificial Sequence
  Synthetic peptide
QVQLVESGGGLVKPGESLRLSCAASGFTFSDYYMYWVRQAPGKCLEWVAIISDHHHWTYYSDIIKGRFTISRDNAKNSLYLQMNSLKAEDTAVYYCARGFPLLRHGAMDYWGQGTLVTVSSGGGGSGGGGSGGGGSDIQMTQSPSSLSASVGDRVTITCKASQNVDTNVAWYQQKPGQAPKSLIYSASYRYSDVPSRFSGSASGTDFTLTISSVQSEDFATYYCQQYDSYPYTFGCGTKLEIKSGGGGSEVQLVESGGGLVQPGGSLKLSCAASGFTFNKYAMNWVRQAPGKGLEWVARIRSKYNNYATYYADSVKDRFTISRDDSKNTAYLQMNNLKTEDTAVYYCVRHGNFGNSYISYWAYWGQGTLVTVSSGGGGSGGGGSGGGGSQTVVTQEPSLTVSPGGTVTLTCGSSTGAVTSGNYPNWVQQKPGQAPRGLIGGTKFLAPGTPARFSGSLLGGKAALTLSGVQPEDEAEYYCVLWYSNRWVFGGGTKLTVL

SEQ ID NO: 220 - protein, 986 aa, Artificial Sequence
  Synthetic peptide
QVQLVESGGGLVKPGESLRLSCAASGFTFSDYYMYWVRQAPGKCLEWVAIISDHHHWTYYSDIIKGRFTISRDNAKNSLYLQMNSLKAEDTAVYYCARGFPLLRHGAMDYWGQGTLVTVSSGGGGSGGGGSGGGGSDIQMTQSPSSLSASVGDRVTITCKASQNVDTNVAWYQQKPGQAPKSLIYSASYRYSDVPSRFSGSASGTDFTLTISSVQSEDFATYYCQQYDSYPYTFGCGTKLEIKSGGGGSEVQLVESGGGLVQPGGSLKLSCAASGFTFNKYAMNWVRQAPGKGLEWVARIRSKYNNYATYYADSVKDRFTISRDDSKNTAYLQMNNLKTEDTAVYYCVRHGNFGNSYISYWAYWGQGTLVTVSSGGGGSGGGGSGGGGSQTVVTQEPSLTVSPGGTVTLTCGSSTGAVTSGNYPNWVQQKPGQAPRGLIGGTKFLAPGTPARFSGSLLGGKAALTLSGVQPEDEAEYYCVLWYSNRWVFGGGTKLTVLGGGGDKTHTCPPCPAPELLGGPSVFLFPPKPKDTLMISRTPEVTCVVVDVSHEDPEVKFNWYVDGVEVHNAKTKPCEEQYGSTYRCVSVLTVLHQDWLNGKEYKCKVSNKALPAPIEKTISKAKGQPREPQVYTLPPSREEMTKNQVSLTCLVKGFYPSDIAVEWESNGQPENNYKTTPPVLDSDGSFFLYSKLTVDKSRWQQGNVFSCSVMHEALHNHYTQKSLSLSPGKGGGGSGGGGSGGGGSGGGGSGGGGSGGGGSDKTHTCPPCPAPELLGGPSVFLFPPKPKDTLMISRTPEVTCVVVDVSHEDPEVKFNWYVDGVEVHNAKTKPCEEQYGSTYRCVSVLTVLHQDWLNGKEYKCKVSNKALPAPIEKTISKAKGQPREPQVYTLPPSREEMTKNQVSLTCLVKGFYPSDIAVEWESNGQPENNYKTTPPVLDSDGSFFLYSKLTVDKSRWQQGNVFSCSVMHEALHNHYTQKSLSLSPGK

SEQ ID NO: 221 - protein, 984 aa, Artificial Sequence
  Synthetic peptide
QVQLVESGGGLVKPGESLRLSCAASGFTFSDYYMYWVRQAPGKCLEWVAIISDHHHWTYYSDIIKGRFTISRDNAKNSLYLQMNSLKAEDTAVYYCARGFPLLRHGAMDYWGQGTLVTVSSGGGGSGGGGSGGGGSDIQMTQSPSSLSASVGDRVTITCKASQNVDTNVAWYQQKPGQAPKSLIYSASYRYSDVPSRFSGSASGTDFTLTISSVQSEDFATYYCQQYDSYPYTFGCGTKLEIKSGGGGSEVQLVESGGGLVQPGGSLKLSCAASGFTFNKYAMNWVRQAPGKGLEWVARIRSKYNNYATYYADSVKDRFTISRDDSKNTAYLQMNNLKTEDTAVYYCVRHGNFGNSYISYWAYWGQGTLVTVSSGGGGSGGGGSGGGGSQTVVTQEPSLTVSPGGTVTLTCGSSTGAVTSGNYPNWVQQKPGQAPRGLIGGTKFLAPGTPARFSGSLLGGKAALTLSGVQPEDEAEYYCVLWYSNRWVFGGGTKLTVLGGGGDKTHTCPPCPAPELLGGPSVFLFPPKPKDTLMISRTPEVTCVVVDVSHEDPEVKFNWYVDGVEVHNAKTKPCEEQYGSTYRCVSVLTVLHQDWLNGKEYKCKVSNKALPAPIEKTISKAKGQPREPQVYTLPPSREEMTKNQVSLTCLVKGFYPSDIAVEWESNGQPENNYKTTPPVLDSDGSFFLYSKLTVDKSRWQQGNVFSCSVMHEALHNHYTQKSLSLSPGGGGSGGGGSGGGGSGGGGSGGGGSGGGGSDKTHTCPPCPAPELLGGPSVFLFPPKPKDTLMISRTPEVTCVVVDVSHEDPEVKFNWYVDGVEVHNAKTKPCEEQYGSTYRCVSVLTVLHQDWLNGKEYKCKVSNKALPAPIEKTISKAKGQPREPQVYTLPPSREEMTKNQVSLTCLVKGFYPSDIAVEWESNGQPENNYKTTPPVLDSDGSFFLYSKLTVDKSRWQQGNVFSCSVMHEALHNHYTQKSLSLSPGK

SEQ ID NO: 222 - protein, 5 aa, Artificial Sequence
  Synthetic peptide
DYYMY

SEQ ID NO: 223 - protein, 17 aa, Artificial Sequence
  Synthetic peptide
IISDGGYYTYYSDIIKG

SEQ ID NO: 224 - protein, 12 aa, Artificial Sequence
  Synthetic peptide
GFPLLRHGAMDY

SEQ ID NO: 225 - protein, 11 aa, Artificial Sequence
  Synthetic peptide
KASQNVDTNVA

SEQ ID NO: 226 - protein, 7 aa, Artificial Sequence
  Synthetic peptide
SASYRYS

SEQ ID NO: 227 - protein, 9 aa, Artificial Sequence
  Synthetic peptide
QQYDRQPLT

SEQ ID NO: 228 - protein, 121 aa, Artificial Sequence; identical to SEQ ID NO: 156
  Synthetic peptide

SEQ ID NO: 229 - protein, 107 aa, Artificial Sequence
  Synthetic peptide
DIQMTQSPSSLSASVGDRVTITCKASQNVDTNVAWYQQKPGQAPKSLIYSASYRYSDVPSRFSGSASGTDFTLTISSVQSEDFATYYCQQYDRQPLTFGGGTKLEIK

SEQ ID NO: 230 - protein, 243 aa, Artificial Sequence
  Synthetic peptide
QVQLVESGGGLVKPGESLRLSCAASGFTFSDYYMYWVRQAPGKGLEWVAIISDGGYYTYYSDIIKGRFTISRDNAKNSLYLQMNSLKAEDTAVYYCARGFPLLRHGAMDYWGQGTLVTVSSGGGGSGGGGSGGGGSDIQMTQSPSSLSASVGDRVTITCKASQNVDTNVAWYQQKPGQAPKSLIYSASYRYSDVPSRFSGSASGTDFTLTISSVQSEDFATYYCQQYDRQPLTFGGGTKLEIK

SEQ ID NO: 231 - protein, 498 aa, Artificial Sequence
  Synthetic peptide
QVQLVESGGGLVKPGESLRLSCAASGFTFSDYYMYWVRQAPGKGLEWVAIISDGGYYTYYSDIIKGRFTISRDNAKNSLYLQMNSLKAEDTAVYYCARGFPLLRHGAMDYWGQGTLVTVSSGGGGSGGGGSGGGGSDIQMTQSPSSLSASVGDRVTITCKASQNVDTNVAWYQQKPGQAPKSLIYSASYRYSDVPSRFSGSASGTDFTLTISSVQSEDFATYYCQQYDRQPLTFGGGTKLEIKSGGGGSEVQLVESGGGLVQPGGSLKLSCAASGFTFNKYAMNWVRQAPGKGLEWVARIRSKYNNYATYYADSVKDRFTISRDDSKNTAYLQMNNLKTEDTAVYYCVRHGNFGNSYISYWAYWGQGTLVTVSSGGGGSGGGGSGGGGSQTVVTQEPSLTVSPGGTVTLTCGSSTGAVTSGNYPNWVQQKPGQAPRGLIGGTKFLAPGTPARFSGSLLGGKAALTLSGVQPEDEAEYYCVLWYSNRWVFGGGTKLTVL

SEQ ID NO: 232 - protein, 986 aa, Artificial Sequence
  Synthetic peptide
QVQLVESGGGLVKPGESLRLSCAASGFTFSDYYMYWVRQAPGKGLEWVAIISDGGYYTYYSDIIKGRFTISRDNAKNSLYLQMNSLKAEDTAVYYCARGFPLLRHGAMDYWGQGTLVTVSSGGGGSGGGGSGGGGSDIQMTQSPSSLSASVGDRVTITCKASQNVDTNVAWYQQKPGQAPKSLIYSASYRYSDVPSRFSGSASGTDFTLTISSVQSEDFATYYCQQYDRQPLTFGGGTKLEIKSGGGGSEVQLVESGGGLVQPGGSLKLSCAASGFTFNKYAMNWVRQAPGKGLEWVARIRSKYNNYATYYADSVKDRFTISRDDSKNTAYLQMNNLKTEDTAVYYCVRHGNFGNSYISYWAYWGQGTLVTVSSGGGGSGGGGSGGGGSQTVVTQEPSLTVSPGGTVTLTCGSSTGAVTSGNYPNWVQQKPGQAPRGLIGGTKFLAPGTPARFSGSLLGGKAALTLSGVQPEDEAEYYCVLWYSNRWVFGGGTKLTVLGGGGDKTHTCPPCPAPELLGGPSVFLFPPKPKDTLMISRTPEVTCVVVDVSHEDPEVKFNWYVDGVEVHNAKTKPCEEQYGSTYRCVSVLTVLHQDWLNGKEYKCKVSNKALPAPIEKTISKAKGQPREPQVYTLPPSREEMTKNQVSLTCLVKGFYPSDIAVEWESNGQPENNYKTTPPVLDSDGSFFLYSKLTVDKSRWQQGNVFSCSVMHEALHNHYTQKSLSLSPGKGGGGSGGGGSGGGGSGGGGSGGGGSGGGGSDKTHTCPPCPAPELLGGPSVFLFPPKPKDTLMISRTPEVTCVVVDVSHEDPEVKFNWYVDGVEVHNAKTKPCEEQYGSTYRCVSVLTVLHQDWLNGKEYKCKVSNKALPAPIEKTISKAKGQPREPQVYTLPPSREEMTKNQVSLTCLVKGFYPSDIAVEWESNGQPENNYKTTPPVLDSDGSFFLYSKLTVDKSRWQQGNVFSCSVMHEALHNHYTQKSLSLSPGK

SEQ ID NO: 233 - protein, 984 aa, Artificial Sequence
  Synthetic peptide
QVQLVESGGGLVKPGESLRLSCAASGFTFSDYYMYWVRQAPGKGLEWVAIISDGGYYTYYSDIIKGRFTISRDNAKNSLYLQMNSLKAEDTAVYYCARGFPLLRHGAMDYWGQGTLVTVSSGGGGSGGGGSGGGGSDIQMTQSPSSLSASVGDRVTITCKASQNVDTNVAWYQQKPGQAPKSLIYSASYRYSDVPSRFSGSASGTDFTLTISSVQSEDFATYYCQQYDRQPLTFGGGTKLEIKSGGGGSEVQLVESGGGLVQPGGSLKLSCAASGFTFNKYAMNWVRQAPGKGLEWVARIRSKYNNYATYYADSVKDRFTISRDDSKNTAYLQMNNLKTEDTAVYYCVRHGNFGNSYISYWAYWGQGTLVTVSSGGGGSGGGGSGGGGSQTVVTQEPSLTVSPGGTVTLTCGSSTGAVTSGNYPNWVQQKPGQAPRGLIGGTKFLAPGTPARFSGSLLGGKAALTLSGVQPEDEAEYYCVLWYSNRWVFGGGTKLTVLGGGGDKTHTCPPCPAPELLGGPSVFLFPPKPKDTLMISRTPEVTCVVVDVSHEDPEVKFNWYVDGVEVHNAKTKPCEEQYGSTYRCVSVLTVLHQDWLNGKEYKCKVSNKALPAPIEKTISKAKGQPREPQVYTLPPSREEMTKNQVSLTCLVKGFYPSDIAVEWESNGQPENNYKTTPPVLDSDGSFFLYSKLTVDKSRWQQGNVFSCSVMHEALHNHYTQKSLSLSPGGGGSGGGGSGGGGSGGGGSGGGGSGGGGSDKTHTCPPCPAPELLGGPSVFLFPPKPKDTLMISRTPEVTCVVVDVSHEDPEVKFNWYVDGVEVHNAKTKPCEEQYGSTYRCVSVLTVLHQDWLNGKEYKCKVSNKALPAPIEKTISKAKGQPREPQVYTLPPSREEMTKNQVSLTCLVKGFYPSDIAVEWESNGQPENNYKTTPPVLDSDGSFFLYSKLTVDKSRWQQGNVFSCSVMHEALHNHYTQKSLSLSPGK

SEQ ID NO: 234 - protein, 121 aa, Artificial Sequence; identical to SEQ ID NO: 162
  Synthetic peptide

SEQ ID NO: 235 - protein, 107 aa, Artificial Sequence
  Synthetic peptide
DIQMTQSPSSLSASVGDRVTITCKASQNVDTNVAWYQQKPGQAPKSLIYSASYRYSDVPSRFSGSASGTDFTLTISSVQSEDFATYYCQQYDRQPLTFGCGTKLEIK

SEQ ID NO: 236 - protein, 243 aa, Artificial Sequence
  Synthetic peptide
QVQLVESGGGLVKPGESLRLSCAASGFTFSDYYMYWVRQAPGKCLEWVAIISDGGYYTYYSDIIKGRFTISRDNAKNSLYLQMNSLKAEDTAVYYCARGFPLLRHGAMDYWGQGTLVTVSSGGGGSGGGGSGGGGSDIQMTQSPSSLSASVGDRVTITCKASQNVDTNVAWYQQKPGQAPKSLIYSASYRYSDVPSRFSGSASGTDFTLTISSVQSEDFATYYCQQYDRQPLTFGCGTKLEIK

SEQ ID NO: 237 - protein, 498 aa, Artificial Sequence
  Synthetic peptide
QVQLVESGGGLVKPGESLRLSCAASGFTFSDYYMYWVRQAPGKCLEWVAIISDGGYYTYYSDIIKGRFTISRDNAKNSLYLQMNSLKAEDTAVYYCARGFPLLRHGAMDYWGQGTLVTVSSGGGGSGGGGSGGGGSDIQMTQSPSSLSASVGDRVTITCKASQNVDTNVAWYQQKPGQAPKSLIYSASYRYSDVPSRFSGSASGTDFTLTISSVQSEDFATYYCQQYDRQPLTFGCGTKLEIKSGGGGSEVQLVESGGGLVQPGGSLKLSCAASGFTFNKYAMNWVRQAPGKGLEWVARIRSKYNNYATYYADSVKDRFTISRDDSKNTAYLQMNNLKTEDTAVYYCVRHGNFGNSYISYWAYWGQGTLVTVSSGGGGSGGGGSGGGGSQTVVTQEPSLTVSPGGTVTLTCGSSTGAVTSGNYPNWVQQKPGQAPRGLIGGTKFLAPGTPARFSGSLLGGKAALTLSGVQPEDEAEYYCVLWYSNRWVFGGGTKLTVL

SEQ ID NO: 238 - protein, 986 aa, Artificial Sequence
  Synthetic peptide
QVQLVESGGGLVKPGESLRLSCAASGFTFSDYYMYWVRQAPGKCLEWVAIISDGGYYTYYSDIIKGRFTISRDNAKNSLYLQMNSLKAEDTAVYYCARGFPLLRHGAMDYWGQGTLVTVSSGGGGSGGGGSGGGGSDIQMTQSPSSLSASVGDRVTITCKASQNVDTNVAWYQQKPGQAPKSLIYSASYRYSDVPSRFSGSASGTDFTLTISSVQSEDFATYYCQQYDRQPLTFGCGTKLEIKSGGGGSEVQLVESGGGLVQPGGSLKLSCAASGFTFNKYAMNWVRQAPGKGLEWVARIRSKYNNYATYYADSVKDRFTISRDDSKNTAYLQMNNLKTEDTAVYYCVRHGNFGNSYISYWAYWGQGTLVTVSSGGGGSGGGGSGGGGSQTVVTQEPSLTVSPGGTVTLTCGSSTGAVTSGNYPNWVQQKPGQAPRGLIGGTKFLAPGTPARFSGSLLGGKAALTLSGVQPEDEAEYYCVLWYSNRWVFGGGTKLTVLGGGGDKTHTCPPCPAPELLGGPSVFLFPPKPKDTLMISRTPEVTCVVVDVSHEDPEVKFNWYVDGVEVHNAKTKPCEEQYGSTYRCVSVLTVLHQDWLNGKEYKCKVSNKALPAPIEKTISKAKGQPREPQVYTLPPSREEMTKNQVSLTCLVKGFYPSDIAVEWESNGQPENNYKTTPPVLDSDGSFFLYSKLTVDKSRWQQGNVFSCSVMHEALHNHYTQKSLSLSPGKGGGGSGGGGSGGGGSGGGGSGGGGSGGGGSDKTHTCPPCPAPELLGGPSVFLFPPKPKDTLMISRTPEVTCVVVDVSHEDPEVKFNWYVDGVEVHNAKTKPCEEQYGSTYRCVSVLTVLHQDWLNGKEYKCKVSNKALPAPIEKTISKAKGQPREPQVYTLPPSREEMTKNQVSLTCLVKGFYPSDIAVEWESNGQPENNYKTTPPVLDSDGSFFLYSKLTVDKSRWQQGNVFSCSVMHEALHNHYTQKSLSLSPGK

SEQ ID NO: 239 - protein, 984 aa, Artificial Sequence
  Synthetic peptide
QVQLVESGGGLVKPGESLRLSCAASGFTFSDYYMYWVRQAPGKCLEWVAIISDGGYYTYYSDIIKGRFTISRDNAKNSLYLQMNSLKAEDTAVYYCARGFPLLRHGAMDYWGQGTLVTVSSGGGGSGGGGSGGGGSDIQMTQSPSSLSASVGDRVTITCKASQNVDTNVAWYQQKPGQAPKSLIYSASYRYSDVPSRFSGSASGTDFTLTISSVQSEDFATYYCQQYDRQPLTFGCGTKLEIKSGGGGSEVQLVESGGGLVQPGGSLKLSCAASGFTFNKYAMNWVRQAPGKGLEWVARIRSKYNNYATYYADSVKDRFTISRDDSKNTAYLQMNNLKTEDTAVYYCVRHGNFGNSYISYWAYWGQGTLVTVSSGGGGSGGGGSGGGGSQTVVTQEPSLTVSPGGTVTLTCGSSTGAVTSGNYPNWVQQKPGQAPRGLIGGTKFLAPGTPARFSGSLLGGKAALTLSGVQPEDEAEYYCVLWYSNRWVFGGGTKLTVLGGGGDKTHTCPPCPAPELLGGPSVFLFPPKPKDTLMISRTPEVTCVVVDVSHEDPEVKFNWYVDGVEVHNAKTKPCEEQYGSTYRCVSVLTVLHQDWLNGKEYKCKVSNKALPAPIEKTISKAKGQPREPQVYTLPPSREEMTKNQVSLTCLVKGFYPSDIAVEWESNGQPENNYKTTPPVLDSDGSFFLYSKLTVDKSRWQQGNVFSCSVMHEALHNHYTQKSLSLSPGGGGSGGGGSGGGGSGGGGSGGGGSGGGGSDKTHTCPPCPAPELLGGPSVFLFPPKPKDTLMISRTPEVTCVVVDVSHEDPEVKFNWYVDGVEVHNAKTKPCEEQYGSTYRCVSVLTVLHQDWLNGKEYKCKVSNKALPAPIEKTISKAKGQPREPQVYTLPPSREEMTKNQVSLTCLVKGFYPSDIAVEWESNGQPENNYKTTPPVLDSDGSFFLYSKLTVDKSRWQQGNVFSCSVMHEALHNHYTQKSLSLSPGK

SEQ ID NO: 240 - protein, 5 aa, Artificial Sequence
  Synthetic peptide
DYYMN

SEQ ID NO: 241 - protein, 17 aa, Artificial Sequence
  Synthetic peptide
IISDGGYYTYYSDIIKG

SEQ ID NO: 242 - protein, 12 aa, Artificial Sequence
  Synthetic peptide
GFPLLRHGAMDY

SEQ ID NO: 243 - protein, 11 aa, Artificial Sequence
  Synthetic peptide
KASQNVDTNVA

SEQ ID NO: 244 - protein, 7 aa, Artificial Sequence
  Synthetic peptide
SASYRYS

SEQ ID NO: 245 - protein, 9 aa, Artificial Sequence
  Synthetic peptide
QQYDLLLLT

SEQ ID NO: 246 - protein, 121 aa, Artificial Sequence; identical to SEQ ID NO: 48
  Synthetic peptide

SEQ ID NO: 247 - protein, 107 aa, Artificial Sequence
  Synthetic peptide
DIQMTQSPSSLSASVGDRVTITCKASQNVDTNVAWYQQKPGQAPKSLIYSASYRYSDVPSRFSGSASGTDFTLTISSLQSEDFATYYCQQYDLLLLTFGGGTKLEIK

SEQ ID NO: 248 - protein, 243 aa, Artificial Sequence
  Synthetic peptide
QVQLVESGGGLVKPGESLRLSCAASGFTFSDYYMNWVRQAPGKGLEWVAIISDGGYYTYYSDIIKGRFTISRDNAKNSLYLQMNSLKAEDTAVYYCARGFPLLRHGAMDYWGQGTLVTVSSGGGGSGGGGSGGGGSDIQMTQSPSSLSASVGDRVTITCKASQNVDTNVAWYQQKPGQAPKSLIYSASYRYSDVPSRFSGSASGTDFTLTISSLQSEDFATYYCQQYDLLLLTFGGGTKLEIK

SEQ ID NO: 249 - protein, 498 aa, Artificial Sequence
  Synthetic peptide
QVQLVESGGGLVKPGESLRLSCAASGFTFSDYYMNWVRQAPGKGLEWVAIISDGGYYTYYSDIIKGRFTISRDNAKNSLYLQMNSLKAEDTAVYYCARGFPLLRHGAMDYWGQGTLVTVSSGGGGSGGGGSGGGGSDIQMTQSPSSLSASVGDRVTITCKASQNVDTNVAWYQQKPGQAPKSLIYSASYRYSDVPSRFSGSASGTDFTLTISSLQSEDFATYYCQQYDLLLLTFGGGTKLEIKSGGGGSEVQLVESGGGLVQPGGSLKLSCAASGFTFNKYAMNWVRQAPGKGLEWVARIRSKYNNYATYYADSVKDRFTISRDDSKNTAYLQMNNLKTEDTAVYYCVRHGNFGNSYISYWAYWGQGTLVTVSSGGGGSGGGGSGGGGSQTVVTQEPSLTVSPGGTVTLTCGSSTGAVTSGNYPNWVQQKPGQAPRGLIGGTKFLAPGTPARFSGSLLGGKAALTLSGVQPEDEAEYYCVLWYSNRWVFGGGTKLTVL

SEQ ID NO: 250 - protein, 986 aa, Artificial Sequence
  Synthetic peptide
QVQLVESGGGLVKPGESLRLSCAASGFTFSDYYMNWVRQAPGKGLEWVAIISDGGYYTYYSDIIKGRFTISRDNAKNSLYLQMNSLKAEDTAVYYCARGFPLLRHGAMDYWGQGTLVTVSSGGGGSGGGGSGGGGSDIQMTQSPSSLSASVGDRVTITCKASQNVDTNVAWYQQKPGQAPKSLIYSASYRYSDVPSRFSGSASGTDFTLTISSLQSEDFATYYCQQYDLLLLTFGGGTKLEIKSGGGGSEVQLVESGGGLVQPGGSLKLSCAASGFTFNKYAMNWVRQAPGKGLEWVARIRSKYNNYATYYADSVKDRFTISRDDSKNTAYLQMNNLKTEDTAVYYCVRHGNFGNSYISYWAYWGQGTLVTVSSGGGGSGGGGSGGGGSQTVVTQEPSLTVSPGGTVTLTCGSSTGAVTSGNYPNWVQQKPGQAPRGLIGGTKFLAPGTPARFSGSLLGGKAALTLSGVQPEDEAEYYCVLWYSNRWVFGGGTKLTVLGGGGDKTHTCPPCPAPELLGGPSVFLFPPKPKDTLMISRTPEVTCVVVDVSHEDPEVKFNWYVDGVEVHNAKTKPCEEQYGSTYRCVSVLTVLHQDWLNGKEYKCKVSNKALPAPIEKTISKAKGQPREPQVYTLPPSREEMTKNQVSLTCLVKGFYPSDIAVEWESNGQPENNYKTTPPVLDSDGSFFLYSKLTVDKSRWQQGNVFSCSVMHEALHNHYTQKSLSLSPGKGGGGSGGGGSGGGGSGGGGSGGGGSGGGGSDKTHTCPPCPAPELLGGPSVFLFPPKPKDTLMISRTPEVTCVVVDVSHEDPEVKFNWYVDGVEVHNAKTKPCEEQYGSTYRCVSVLTVLHQDWLNGKEYKCKVSNKALPAPIEKTISKAKGQPREPQVYTLPPSREEMTKNQVSLTCLVKGFYPSDIAVEWESNGQPENNYKTTPPVLDSDGSFFLYSKLTVDKSRWQQGNVFSCSVMHEALHNHYTQKSLSLSPGK

SEQ ID NO: 251 - protein, 984 aa, Artificial Sequence
  Synthetic peptide
QVQLVESGGGLVKPGESLRLSCAASGFTFSDYYMNWVRQAPGKGLEWVAIISDGGYYTYYSDIIKGRFTISRDNAKNSLYLQMNSLKAEDTAVYYCARGFPLLRHGAMDYWGQGTLVTVSSGGGGSGGGGSGGGGSDIQMTQSPSSLSASVGDRVTITCKASQNVDTNVAWYQQKPGQAPKSLIYSASYRYSDVPSRFSGSASGTDFTLTISSLQSEDFATYYCQQYDLLLLTFGGGTKLEIKSGGGGSEVQLVESGGGLVQPGGSLKLSCAASGFTFNKYAMNWVRQAPGKGLEWVARIRSKYNNYATYYADSVKDRFTISRDDSKNTAYLQMNNLKTEDTAVYYCVRHGNFGNSYISYWAYWGQGTLVTVSSGGGGSGGGGSGGGGSQTVVTQEPSLTVSPGGTVTLTCGSSTGAVTSGNYPNWVQQKPGQAPRGLIGGTKFLAPGTPARFSGSLLGGKAALTLSGVQPEDEAEYYCVLWYSNRWVFGGGTKLTVLGGGGDKTHTCPPCPAPELLGGPSVFLFPPKPKDTLMISRTPEVTCVVVDVSHEDPEVKFNWYVDGVEVHNAKTKPCEEQYGSTYRCVSVLTVLHQDWLNGKEYKCKVSNKALPAPIEKTISKAKGQPREPQVYTLPPSREEMTKNQVSLTCLVKGFYPSDIAVEWESNGQPENNYKTTPPVLDSDGSFFLYSKLTVDKSRWQQGNVFSCSVMHEALHNHYTQKSLSLSPGGGGSGGGGSGGGGSGGGGSGGGGSGGGGSDKTHTCPPCPAPELLGGPSVFLFPPKPKDTLMISRTPEVTCVVVDVSHEDPEVKFNWYVDGVEVHNAKTKPCEEQYGSTYRCVSVLTVLHQDWLNGKEYKCKVSNKALPAPIEKTISKAKGQPREPQVYTLPPSREEMTKNQVSLTCLVKGFYPSDIAVEWESNGQPENNYKTTPPVLDSDGSFFLYSKLTVDKSRWQQGNVFSCSVMHEALHNHYTQKSLSLSPGK

SEQ ID NO: 252 - protein, 121 aa, Artificial Sequence; identical to SEQ ID NO: 54
  Synthetic peptide

SEQ ID NO: 253 - protein, 107 aa, Artificial Sequence
  Synthetic peptide
DIQMTQSPSSLSASVGDRVTITCKASQNVDTNVAWYQQKPGQAPKSLIYSASYRYSDVPSRFSGSASGTDFTLTISSLQSEDFATYYCQQYDLLLLTFGCGTKLEIK

SEQ ID NO: 254 - protein, 243 aa, Artificial Sequence
  Synthetic peptide
QVQLVESGGGLVKPGESLRLSCAASGFTFSDYYMNWVRQAPGKCLEWVAIISDGGYYTYYSDIIKGRFTISRDNAKNSLYLQMNSLKAEDTAVYYCARGFPLLRHGAMDYWGQGTLVTVSSGGGGSGGGGSGGGGSDIQMTQSPSSLSASVGDRVTITCKASQNVDTNVAWYQQKPGQAPKSLIYSASYRYSDVPSRFSGSASGTDFTLTISSLQSEDFATYYCQQYDLLLLTFGCGTKLEIK

SEQ ID NO: 255 - protein, 498 aa, Artificial Sequence
  Synthetic peptide
QVQLVESGGGLVKPGESLRLSCAASGFTFSDYYMNWVRQAPGKCLEWVAIISDGGYYTYYSDIIKGRFTISRDNAKNSLYLQMNSLKAEDTAVYYCARGFPLLRHGAMDYWGQGTLVTVSSGGGGSGGGGSGGGGSDIQMTQSPSSLSASVGDRVTITCKASQNVDTNVAWYQQKPGQAPKSLIYSASYRYSDVPSRFSGSASGTDFTLTISSLQSEDFATYYCQQYDLLLLTFGCGTKLEIKSGGGGSEVQLVESGGGLVQPGGSLKLSCAASGFTFNKYAMNWVRQAPGKGLEWVARIRSKYNNYATYYADSVKDRFTISRDDSKNTAYLQMNNLKTEDTAVYYCVRHGNFGNSYISYWAYWGQGTLVTVSSGGGGSGGGGSGGGGSQTVVTQEPSLTVSPGGTVTLTCGSSTGAVTSGNYPNWVQQKPGQAPRGLIGGTKFLAPGTPARFSGSLLGGKAALTLSGVQPEDEAEYYCVLWYSNRWVFGGGTKLTVL

SEQ ID NO: 256 - protein, 986 aa, Artificial Sequence
  Synthetic peptide
QVQLVESGGGLVKPGESLRLSCAASGFTFSDYYMNWVRQAPGKCLEWVAIISDGGYYTYYSDIIKGRFTISRDNAKNSLYLQMNSLKAEDTAVYYCARGFPLLRHGAMDYWGQGTLVTVSSGGGGSGGGGSGGGGSDIQMTQSPSSLSASVGDRVTITCKASQNVDTNVAWYQQKPGQAPKSLIYSASYRYSDVPSRFSGSASGTDFTLTISSLQSEDFATYYCQQYDLLLLTFGCGTKLEIKSGGGGSEVQLVESGGGLVQPGGSLKLSCAASGFTFNKYAMNWVRQAPGKGLEWVARIRSKYNNYATYYADSVKDRFTISRDDSKNTAYLQMNNLKTEDTAVYYCVRHGNFGNSYISYWAYWGQGTLVTVSSGGGGSGGGGSGGGGSQTVVTQEPSLTVSPGGTVTLTCGSSTGAVTSGNYPNWVQQKPGQAPRGLIGGTKFLAPGTPARFSGSLLGGKAALTLSGVQPEDEAEYYCVLWYSNRWVFGGGTKLTVLGGGGDKTHTCPPCPAPELLGGPSVFLFPPKPKDTLMISRTPEVTCVVVDVSHEDPEVKFNWYVDGVEVHNAKTKPCEEQYGSTYRCVSVLTVLHQDWLNGKEYKCKVSNKALPAPIEKTISKAKGQPREPQVYTLPPSREEMTKNQVSLTCLVKGFYPSDIAVEWESNGQPENNYKTTPPVLDSDGSFFLYSKLTVDKSRWQQGNVFSCSVMHEALHNHYTQKSLSLSPGKGGGGSGGGGSGGGGSGGGGSGGGGSGGGGSDKTHTCPPCPAPELLGGPSVFLFPPKPKDTLMISRTPEVTCVVVDVSHEDPEVKFNWYVDGVEVHNAKTKPCEEQYGSTYRCVSVLTVLHQDWLNGKEYKCKVSNKALPAPIEKTISKAKGQPREPQVYTLPPSREEMTKNQVSLTCLVKGFYPSDIAVEWESNGQPENNYKTTPPVLDSDGSFFLYSKLTVDKSRWQQGNVFSCSVMHEALHNHYTQKSLSLSPGK

SEQ ID NO: 257 - protein, 984 aa, Artificial Sequence
  Synthetic peptide
QVQLVESGGGLVKPGESLRLSCAASGFTFSDYYMNWVRQAPGKCLEWVAIISDGGYYTYYSDIIKGRFTISRDNAKNSLYLQMNSLKAEDTAVYYCARGFPLLRHGAMDYWGQGTLVTVSSGGGGSGGGGSGGGGSDIQMTQSPSSLSASVGDRVTITCKASQNVDTNVAWYQQKPGQAPKSLIYSASYRYSDVPSRFSGSASGTDFTLTISSLQSEDFATYYCQQYDLLLLTFGCGTKLEIKSGGGGSEVQLVESGGGLVQPGGSLKLSCAASGFTFNKYAMNWVRQAPGKGLEWVARIRSKYNNYATYYADSVKDRFTISRDDSKNTAYLQMNNLKTEDTAVYYCVRHGNFGNSYISYWAYWGQGTLVTVSSGGGGSGGGGSGGGGSQTVVTQEPSLTVSPGGTVTLTCGSSTGAVTSGNYPNWVQQKPGQAPRGLIGGTKFLAPGTPARFSGSLLGGKAALTLSGVQPEDEAEYYCVLWYSNRWVFGGGTKLTVLGGGGDKTHTCPPCPAPELLGGPSVFLFPPKPKDTLMISRTPEVTCVVVDVSHEDPEVKFNWYVDGVEVHNAKTKPCEEQYGSTYRCVSVLTVLHQDWLNGKEYKCKVSNKALPAPIEKTISKAKGQPREPQVYTLPPSREEMTKNQVSLTCLVKGFYPSDIAVEWESNGQPENNYKTTPPVLDSDGSFFLYSKLTVDKSRWQQGNVFSCSVMHEALHNHYTQKSLSLSPGGGGSGGGGSGGGGSGGGGSGGGGSGGGGSDKTHTCPPCPAPELLGGPSVFLFPPKPKDTLMISRTPEVTCVVVDVSHEDPEVKFNWYVDGVEVHNAKTKPCEEQYGSTYRCVSVLTVLHQDWLNGKEYKCKVSNKALPAPIEKTISKAKGQPREPQVYTLPPSREEMTKNQVSLTCLVKGFYPSDIAVEWESNGQPENNYKTTPPVLDSDGSFFLYSKLTVDKSRWQQGNVFSCSVMHEALHNHYTQKSLSLSPGK

SEQ ID NO: 258 - protein, 5 aa, Artificial Sequence
  Synthetic peptide
DYYMY

SEQ ID NO: 259 - protein, 17 aa, Artificial Sequence
  Synthetic peptide
IISDSTLHTYYSDIIKG

SEQ ID NO: 260 - protein, 12 aa, Artificial Sequence
  Synthetic peptide
GFPLLRHGAMDY

SEQ ID NO: 261 - protein, 11 aa, Artificial Sequence
  Synthetic peptide
KASQNVDTNVA

SEQ ID NO: 262 - protein, 7 aa, Artificial Sequence
  Synthetic peptide
SASYRYS

SEQ ID NO: 263 - protein, 9 aa, Artificial Sequence
  Synthetic peptide
QQYDSYPYT

SEQ ID NO: 264 - protein, 121 aa, Artificial Sequence
  Synthetic peptide
QVQLVESGGGLVKPGESLRLSCAASGFTFSDYYMYWVRQAPGKGLEWVAIISDSTLHTYYSDIIKGRFTISRDNAKNSLYLQMNSLKAEDTAVYYCARGFPLLRHGAMDYWGQGTLVTVSS

SEQ ID NO: 265 - protein, 107 aa, Artificial Sequence; identical to SEQ ID NO: 67
  Synthetic peptide

SEQ ID NO: 266 - protein, 243 aa, Artificial Sequence
  Synthetic peptide
QVQLVESGGGLVKPGESLRLSCAASGFTFSDYYMYWVRQAPGKGLEWVAIISDSTLHTYYSDIIKGRFTISRDNAKNSLYLQMNSLKAEDTAVYYCARGFPLLRHGAMDYWGQGTLVTVSSGGGGSGGGGSGGGGSDIQMTQSPSSLSASVGDRVTITCKASQNVDTNVAWYQQKPGQAPKSLIYSASYRYSDVPSRFSGSASGTDFTLTISSVQSEDFATYYCQQYDSYPYTFGGGTKLEIK

SEQ ID NO: 267 - protein, 498 aa, Artificial Sequence
  Synthetic peptide
QVQLVESGGGLVKPGESLRLSCAASGFTFSDYYMYWVRQAPGKGLEWVAIISDSTLHTYYSDIIKGRFTISRDNAKNSLYLQMNSLKAEDTAVYYCARGFPLLRHGAMDYWGQGTLVTVSSGGGGSGGGGSGGGGSDIQMTQSPSSLSASVGDRVTITCKASQNVDTNVAWYQQKPGQAPKSLIYSASYRYSDVPSRFSGSASGTDFTLTISSVQSEDFATYYCQQYDSYPYTFGGGTKLEIKSGGGGSEVQLVESGGGLVQPGGSLKLSCAASGFTFNKYAMNWVRQAPGKGLEWVARIRSKYNNYATYYADSVKDRFTISRDDSKNTAYLQMNNLKTEDTAVYYCVRHGNFGNSYISYWAYWGQGTLVTVSSGGGGSGGGGSGGGGSQTVVTQEPSLTVSPGGTVTLTCGSSTGAVTSGNYPNWVQQKPGQAPRGLIGGTKFLAPGTPARFSGSLLGGKAALTLSGVQPEDEAEYYCVLWYSNRWVFGGGTKLTVL

SEQ ID NO: 268 - protein, 986 aa, Artificial Sequence
  Synthetic peptide
QVQLVESGGGLVKPGESLRLSCAASGFTFSDYYMYWVRQAPGKGLEWVAIISDSTLHTYYSDIIKGRFTISRDNAKNSLYLQMNSLKAEDTAVYYCARGFPLLRHGAMDYWGQGTLVTVSSGGGGSGGGGSGGGGSDIQMTQSPSSLSASVGDRVTITCKASQNVDTNVAWYQQKPGQAPKSLIYSASYRYSDVPSRFSGSASGTDFTLTISSVQSEDFATYYCQQYDSYPYTFGGGTKLEIKSGGGGSEVQLVESGGGLVQPGGSLKLSCAASGFTFNKYAMNWVRQAPGKGLEWVARIRSKYNNYATYYADSVKDRFTISRDDSKNTAYLQMNNLKTEDTAVYYCVRHGNFGNSYISYWAYWGQGTLVTVSSGGGGSGGGGSGGGGSQTVVTQEPSLTVSPGGTVTLTCGSSTGAVTSGNYPNWVQQKPGQAPRGLIGGTKFLAPGTPARFSGSLLGGKAALTLSGVQPEDEAEYYCVLWYSNRWVFGGGTKLTVLGGGGDKTHTCPPCPAPELLGGPSVFLFPPKPKDTLMISRTPEVTCVVVDVSHEDPEVKFNWYVDGVEVHNAKTKPCEEQYGSTYRCVSVLTVLHQDWLNGKEYKCKVSNKALPAPIEKTISKAKGQPREPQVYTLPPSREEMTKNQVSLTCLVKGFYPSDIAVEWESNGQPENNYKTTPPVLDSDGSFFLYSKLTVDKSRWQQGNVFSCSVMHEALHNHYTQKSLSLSPGKGGGGSGGGGSGGGGSGGGGSGGGGSGGGGSDKTHTCPPCPAPELLGGPSVFLFPPKPKDTLMISRTPEVTCVVVDVSHEDPEVKFNWYVDGVEVHNAKTKPCEEQYGSTYRCVSVLTVLHQDWLNGKEYKCKVSNKALPAPIEKTISKAKGQPREPQVYTLPPSREEMTKNQVSLTCLVKGFYPSDIAVEWESNGQPENNYKTTPPVLDSDGSFFLYSKLTVDKSRWQQGNVFSCSVMHEALHNHYTQKSLSLSPGK

SEQ ID NO: 269 - protein, 984 aa, Artificial Sequence
  Synthetic peptide
QVQLVESGGGLVKPGESLRLSCAASGFTFSDYYMYWVRQAPGKGLEWVAIISDSTLHTYYSDIIKGRFTISRDNAKNSLYLQMNSLKAEDTAVYYCARGFPLLRHGAMDYWGQGTLVTVSSGGGGSGGGGSGGGGSDIQMTQSPSSLSASVGDRVTITCKASQNVDTNVAWYQQKPGQAPKSLIYSASYRYSDVPSRFSGSASGTDFTLTISSVQSEDFATYYCQQYDSYPYTFGGGTKLEIKSGGGGSEVQLVESGGGLVQPGGSLKLSCAASGFTFNKYAMNWVRQAPGKGLEWVARIRSKYNNYATYYADSVKDRFTISRDDSKNTAYLQMNNLKTEDTAVYYCVRHGNFGNSYISYWAYWGQGTLVTVSSGGGGSGGGGSGGGGSQTVVTQEPSLTVSPGGTVTLTCGSSTGAVTSGNYPNWVQQKPGQAPRGLIGGTKFLAPGTPARFSGSLLGGKAALTLSGVQPEDEAEYYCVLWYSNRWVFGGGTKLTVLGGGGDKTHTCPPCPAPELLGGPSVFLFPPKPKDTLMISRTPEVTCVVVDVSHEDPEVKFNWYVDGVEVHNAKTKPCEEQYGSTYRCVSVLTVLHQDWLNGKEYKCKVSNKALPAPIEKTISKAKGQPREPQVYTLPPSREEMTKNQVSLTCLVKGFYPSDIAVEWESNGQPENNYKTTPPVLDSDGSFFLYSKLTVDKSRWQQGNVFSCSVMHEALHNHYTQKSLSLSPGGGGSGGGGSGGGGSGGGGSGGGGSGGGGSDKTHTCPPCPAPELLGGPSVFLFPPKPKDTLMISRTPEVTCVVVDVSHEDPEVKFNWYVDGVEVHNAKTKPCEEQYGSTYRCVSVLTVLHQDWLNGKEYKCKVSNKALPAPIEKTISKAKGQPREPQVYTLPPSREEMTKNQVSLTCLVKGFYPSDIAVEWESNGQPENNYKTTPPVLDSDGSFFLYSKLTVDKSRWQQGNVFSCSVMHEALHNHYTQKSLSLSPGK

SEQ ID NO: 270 - protein, 121 aa, Artificial Sequence
  Synthetic peptide
QVQLVESGGGLVKPGESLRLSCAASGFTFSDYYMYWVRQAPGKCLEWVAIISDSTLHTYYSDIIKGRFTISRDNAKNSLYLQMNSLKAEDTAVYYCARGFPLLRHGAMDYWGQGTLVTVSS

SEQ ID NO: 271 - protein, 107 aa, Artificial Sequence; identical to SEQ ID NO: 73
  Synthetic peptide

SEQ ID NO: 272 - protein, 243 aa, Artificial Sequence
  Synthetic peptide
QVQLVESGGGLVKPGESLRLSCAASGFTFSDYYMYWVRQAPGKCLEWVAIISDSTLHTYYSDIIKGRFTISRDNAKNSLYLQMNSLKAEDTAVYYCARGFPLLRHGAMDYWGQGTLVTVSSGGGGSGGGGSGGGGSDIQMTQSPSSLSASVGDRVTITCKASQNVDTNVAWYQQKPGQAPKSLIYSASYRYSDVPSRFSGSASGTDFTLTISSVQSEDFATYYCQQYDSYPYTFGCGTKLEIK

SEQ ID NO: 273 - protein, 498 aa, Artificial Sequence
  Synthetic peptide
QVQLVESGGGLVKPGESLRLSCAASGFTFSDYYMYWVRQAPGKCLEWVAIISDSTLHTYYSDIIKGRFTISRDNAKNSLYLQMNSLKAEDTAVYYCARGFPLLRHGAMDYWGQGTLVTVSSGGGGSGGGGSGGGGSDIQMTQSPSSLSASVGDRVTITCKASQNVDTNVAWYQQKPGQAPKSLIYSASYRYSDVPSRFSGSASGTDFTLTISSVQSEDFATYYCQQYDSYPYTFGCGTKLEIKSGGGGSEVQLVESGGGLVQPGGSLKLSCAASGFTFNKYAMNWVRQAPGKGLEWVARIRSKYNNYATYYADSVKDRFTISRDDSKNTAYLQMNNLKTEDTAVYYCVRHGNFGNSYISYWAYWGQGTLVTVSSGGGGSGGGGSGGGGSQTVVTQEPSLTVSPGGTVTLTCGSSTGAVTSGNYPNWVQQKPGQAPRGLIGGTKFLAPGTPARFSGSLLGGKAALTLSGVQPEDEAEYYCVLWYSNRWVFGGGTKLTVL

SEQ ID NO: 274 - protein, 986 aa, Artificial Sequence
  Synthetic peptide
QVQLVESGGGLVKPGESLRLSCAASGFTFSDYYMYWVRQAPGKCLEWVAIISDSTLHTYYSDIIKGRFTISRDNAKNSLYLQMNSLKAEDTAVYYCARGFPLLRHGAMDYWGQGTLVTVSSGGGGSGGGGSGGGGSDIQMTQSPSSLSASVGDRVTITCKASQNVDTNVAWYQQKPGQAPKSLIYSASYRYSDVPSRFSGSASGTDFTLTISSVQSEDFATYYCQQYDSYPYTFGCGTKLEIKSGGGGSEVQLVESGGGLVQPGGSLKLSCAASGFTFNKYAMNWVRQAPGKGLEWVARIRSKYNNYATYYADSVKDRFTISRDDSKNTAYLQMNNLKTEDTAVYYCVRHGNFGNSYISYWAYWGQGTLVTVSSGGGGSGGGGSGGGGSQTVVTQEPSLTVSPGGTVTLTCGSSTGAVTSGNYPNWVQQKPGQAPRGLIGGTKFLAPGTPARFSGSLLGGKAALTLSGVQPEDEAEYYCVLWYSNRWVFGGGTKLTVLGGGGDKTHTCPPCPAPELLGGPSVFLFPPKPKDTLMISRTPEVTCVVVDVSHEDPEVKFNWYVDGVEVHNAKTKPCEEQYGSTYRCVSVLTVLHQDWLNGKEYKCKVSNKALPAPIEKTISKAKGQPREPQVYTLPPSREEMTKNQVSLTCLVKGFYPSDIAVEWESNGQPENNYKTTPPVLDSDGSFFLYSKLTVDKSRWQQGNVFSCSVMHEALHNHYTQKSLSLSPGKGGGGSGGGGSGGGGSGGGGSGGGGSGGGGSDKTHTCPPCPAPELLGGPSVFLFPPKPKDTLMISRTPEVTCVVVDVSHEDPEVKFNWYVDGVEVHNAKTKPCEEQYGSTYRCVSVLTVLHQDWLNGKEYKCKVSNKALPAPIEKTISKAKGQPREPQVYTLPPSREEMTKNQVSLTCLVKGFYPSDIAVEWESNGQPENNYKTTPPVLDSDGSFFLYSKLTVDKSRWQQGNVFSCSVMHEALHNHYTQKSLSLSPGK

SEQ ID NO: 275 - protein, 984 aa, Artificial Sequence
  Synthetic peptide
QVQLVESGGGLVKPGESLRLSCAASGFTFSDYYMYWVRQAPGKCLEWVAIISDSTLHTYYSDIIKGRFTISRDNAKNSLYLQMNSLKAEDTAVYYCARGFPLLRHGAMDYWGQGTLVTVSSGGGGSGGGGSGGGGSDIQMTQSPSSLSASVGDRVTITCKASQNVDTNVAWYQQKPGQAPKSLIYSASYRYSDVPSRFSGSASGTDFTLTISSVQSEDFATYYCQQYDSYPYTFGCGTKLEIKSGGGGSEVQLVESGGGLVQPGGSLKLSCAASGFTFNKYAMNWVRQAPGKGLEWVARIRSKYNNYATYYADSVKDRFTISRDDSKNTAYLQMNNLKTEDTAVYYCVRHGNFGNSYISYWAYWGQGTLVTVSSGGGGSGGGGSGGGGSQTVVTQEPSLTVSPGGTVTLTCGSSTGAVTSGNYPNWVQQKPGQAPRGLIGGTKFLAPGTPARFSGSLLGGKAALTLSGVQPEDEAEYYCVLWYSNRWVFGGGTKLTVLGGGGDKTHTCPPCPAPELLGGPSVFLFPPKPKDTLMISRTPEVTCVVVDVSHEDPEVKFNWYVDGVEVHNAKTKPCEEQYGSTYRCVSVLTVLHQDWLNGKEYKCKVSNKALPAPIEKTISKAKGQPREPQVYTLPPSREEMTKNQVSLTCLVKGFYPSDIAVEWESNGQPENNYKTTPPVLDSDGSFFLYSKLTVDKSRWQQGNVFSCSVMHEALHNHYTQKSLSLSPGGGGSGGGGSGGGGSGGGGSGGGGSGGGGSDKTHTCPPCPAPELLGGPSVFLFPPKPKDTLMISRTPEVTCVVVDVSHEDPEVKFNWYVDGVEVHNAKTKPCEEQYGSTYRCVSVLTVLHQDWLNGKEYKCKVSNKALPAPIEKTISKAKGQPREPQVYTLPPSREEMTKNQVSLTCLVKGFYPSDIAVEWESNGQPENNYKTTPPVLDSDGSFFLYSKLTVDKSRWQQGNVFSCSVMHEALHNHYTQKSLSLSPGK

SEQ ID NO: 276 - protein, 5 aa, Artificial Sequence
  Synthetic peptide
DYYMY

SEQ ID NO: 277 - protein, 17 aa, Artificial Sequence
  Synthetic peptide
IISDGGYYTYYSDIIKG

SEQ ID NO: 278 - protein, 12 aa, Artificial Sequence
  Synthetic peptide
GFPLLRHGAMDY

SEQ ID NO: 279 - protein, 11 aa, Artificial Sequence
  Synthetic peptide
KASQNVDTNVA

SEQ ID NO: 280 - protein, 7 aa, Artificial Sequence
  Synthetic peptide
SASYRYS

SEQ ID NO: 281 - protein, 9 aa, Artificial Sequence
  Synthetic peptide
QQYDAPMGT

SEQ ID NO: 282 - protein, 121 aa, Artificial Sequence; identical to SEQ ID NO: 156
  Synthetic peptide

SEQ ID NO: 283 - protein, 107 aa, Artificial Sequence
  Synthetic peptide
DIQMTQSPSSLSASVGDRVTITCKASQNVDTNVAWYQQKPGQAPKSLIYSASYRYSDVPSRFSGSASGTDFTLTISSVQSEDFATYYCQQYDAPMGTFGGGTKLEIK

SEQ ID NO: 284 - protein, 243 aa, Artificial Sequence
  Synthetic peptide
QVQLVESGGGLVKPGESLRLSCAASGFTFSDYYMYWVRQAPGKGLEWVAIISDGGYYTYYSDIIKGRFTISRDNAKNSLYLQMNSLKAEDTAVYYCARGFPLLRHGAMDYWGQGTLVTVSSGGGGSGGGGSGGGGSDIQMTQSPSSLSASVGDRVTITCKASQNVDTNVAWYQQKPGQAPKSLIYSASYRYSDVPSRFSGSASGTDFTLTISSVQSEDFATYYCQQYDAPMGTFGGGTKLEIK

SEQ ID NO: 285 - protein, 498 aa, Artificial Sequence
  Synthetic peptide
QVQLVESGGGLVKPGESLRLSCAASGFTFSDYYMYWVRQAPGKGLEWVAIISDGGYYTYYSDIIKGRFTISRDNAKNSLYLQMNSLKAEDTAVYYCARGFPLLRHGAMDYWGQGTLVTVSSGGGGSGGGGSGGGGSDIQMTQSPSSLSASVGDRVTITCKASQNVDTNVAWYQQKPGQAPKSLIYSASYRYSDVPSRFSGSASGTDFTLTISSVQSEDFATYYCQQYDAPMGTFGGGTKLEIKSGGGGSEVQLVESGGGLVQPGGSLKLSCAASGFTFNKYAMNWVRQAPGKGLEWVARIRSKYNNYATYYADSVKDRFTISRDDSKNTAYLQMNNLKTEDTAVYYCVRHGNFGNSYISYWAYWGQGTLVTVSSGGGGSGGGGSGGGGSQTVVTQEPSLTVSPGGTVTLTCGSSTGAVTSGNYPNWVQQKPGQAPRGLIGGTKFLAPGTPARFSGSLLGGKAALTLSGVQPEDEAEYYCVLWYSNRWVFGGGTKLTVL

SEQ ID NO: 286 - protein, 986 aa, Artificial Sequence
  Synthetic peptide
QVQLVESGGGLVKPGESLRLSCAASGFTFSDYYMYWVRQAPGKGLEWVAIISDGGYYTYYSDIIKGRFTISRDNAKNSLYLQMNSLKAEDTAVYYCARGFPLLRHGAMDYWGQGTLVTVSSGGGGSGGGGSGGGGSDIQMTQSPSSLSASVGDRVTITCKASQNVDTNVAWYQQKPGQAPKSLIYSASYRYSDVPSRFSGSASGTDFTLTISSVQSEDFATYYCQQYDAPMGTFGGGTKLEIKSGGGGSEVQLVESGGGLVQPGGSLKLSCAASGFTFNKYAMNWVRQAPGKGLEWVARIRSKYNNYATYYADSVKDRFTISRDDSKNTAYLQMNNLKTEDTAVYYCVRHGNFGNSYISYWAYWGQGTLVTVSSGGGGSGGGGSGGGGSQTVVTQEPSLTVSPGGTVTLTCGSSTGAVTSGNYPNWVQQKPGQAPRGLIGGTKFLAPGTPARFSGSLLGGKAALTLSGVQPEDEAEYYCVLWYSNRWVFGGGTKLTVLGGGGDKTHTCPPCPAPELLGGPSVFLFPPKPKDTLMISRTPEVTCVVVDVSHEDPEVKFNWYVDGVEVHNAKTKPCEEQYGSTYRCVSVLTVLHQDWLNGKEYKCKVSNKALPAPIEKTISKAKGQPREPQVYTLPPSREEMTKNQVSLTCLVKGFYPSDIAVEWESNGQPENNYKTTPPVLDSDGSFFLYSKLTVDKSRWQQGNVFSCSVMHEALHNHYTQKSLSLSPGKGGGGSGGGGSGGGGSGGGGSGGGGSGGGGSDKTHTCPPCPAPELLGGPSVFLFPPKPKDTLMISRTPEVTCVVVDVSHEDPEVKFNWYVDGVEVHNAKTKPCEEQYGSTYRCVSVLTVLHQDWLNGKEYKCKVSNKALPAPIEKTISKAKGQPREPQVYTLPPSREEMTKNQVSLTCLVKGFYPSDIAVEWESNGQPENNYKTTPPVLDSDGSFFLYSKLTVDKSRWQQGNVFSCSVMHEALHNHYTQKSLSLSPGK

SEQ ID NO: 287 - protein, 984 aa, Artificial Sequence
  Synthetic peptide
QVQLVESGGGLVKPGESLRLSCAASGFTFSDYYMYWVRQAPGKGLEWVAIISDGGYYTYYSDIIKGRFTISRDNAKNSLYLQMNSLKAEDTAVYYCARGFPLLRHGAMDYWGQGTLVTVSSGGGGSGGGGSGGGGSDIQMTQSPSSLSASVGDRVTITCKASQNVDTNVAWYQQKPGQAPKSLIYSASYRYSDVPSRFSGSASGTDFTLTISSVQSEDFATYYCQQYDAPMGTFGGGTKLEIKSGGGGSEVQLVESGGGLVQPGGSLKLSCAASGFTFNKYAMNWVRQAPGKGLEWVARIRSKYNNYATYYADSVKDRFTISRDDSKNTAYLQMNNLKTEDTAVYYCVRHGNFGNSYISYWAYWGQGTLVTVSSGGGGSGGGGSGGGGSQTVVTQEPSLTVSPGGTVTLTCGSSTGAVTSGNYPNWVQQKPGQAPRGLIGGTKFLAPGTPARFSGSLLGGKAALTLSGVQPEDEAEYYCVLWYSNRWVFGGGTKLTVLGGGGDKTHTCPPCPAPELLGGPSVFLFPPKPKDTLMISRTPEVTCVVVDVSHEDPEVKFNWYVDGVEVHNAKTKPCEEQYGSTYRCVSVLTVLHQDWLNGKEYKCKVSNKALPAPIEKTISKAKGQPREPQVYTLPPSREEMTKNQVSLTCLVKGFYPSDIAVEWESNGQPENNYKTTPPVLDSDGSFFLYSKLTVDKSRWQQGNVFSCSVMHEALHNHYTQKSLSLSPGGGGSGGGGSGGGGSGGGGSGGGGSGGGGSDKTHTCPPCPAPELLGGPSVFLFPPKPKDTLMISRTPEVTCVVVDVSHEDPEVKFNWYVDGVEVHNAKTKPCEEQYGSTYRCVSVLTVLHQDWLNGKEYKCKVSNKALPAPIEKTISKAKGQPREPQVYTLPPSREEMTKNQVSLTCLVKGFYPSDIAVEWESNGQPENNYKTTPPVLDSDGSFFLYSKLTVDKSRWQQGNVFSCSVMHEALHNHYTQKSLSLSPGK

SEQ ID NO: 288 - protein, 121 aa, Artificial Sequence; identical to SEQ ID NO: 162
  Synthetic peptide

SEQ ID NO: 289 - protein, 107 aa, Artificial Sequence
  Synthetic peptide
DIQMTQSPSSLSASVGDRVTITCKASQNVDTNVAWYQQKPGQAPKSLIYSASYRYSDVPSRFSGSASGTDFTLTISSVQSEDFATYYCQQYDAPMGTFGCGTKLEIK

SEQ ID NO: 290 - protein, 243 aa, Artificial Sequence
  Synthetic peptide
QVQLVESGGGLVKPGESLRLSCAASGFTFSDYYMYWVRQAPGKCLEWVAIISDGGYYTYYSDIIKGRFTISRDNAKNSLYLQMNSLKAEDTAVYYCARGFPLLRHGAMDYWGQGTLVTVSSGGGGSGGGGSGGGGSDIQMTQSPSSLSASVGDRVTITCKASQNVDTNVAWYQQKPGQAPKSLIYSASYRYSDVPSRFSGSASGTDFTLTISSVQSEDFATYYCQQYDAPMGTFGCGTKLEIK

SEQ ID NO: 291 - protein, 498 aa, Artificial Sequence
  Synthetic peptide
QVQLVESGGGLVKPGESLRLSCAASGFTFSDYYMYWVRQAPGKCLEWVAIISDGGYYTYYSDIIKGRFTISRDNAKNSLYLQMNSLKAEDTAVYYCARGFPLLRHGAMDYWGQGTLVTVSSGGGGSGGGGSGGGGSDIQMTQSPSSLSASVGDRVTITCKASQNVDTNVAWYQQKPGQAPKSLIYSASYRYSDVPSRFSGSASGTDFTLTISSVQSEDFATYYCQQYDAPMGTFGCGTKLEIKSGGGGSEVQLVESGGGLVQPGGSLKLSCAASGFTFNKYAMNWVRQAPGKGLEWVARIRSKYNNYATYYADSVKDRFTISRDDSKNTAYLQMNNLKTEDTAVYYCVRHGNFGNSYISYWAYWGQGTLVTVSSGGGGSGGGGSGGGGSQTVVTQEPSLTVSPGGTVTLTCGSSTGAVTSGNYPNWVQQKPGQAPRGLIGGTKFLAPGTPARFSGSLLGGKAALTLSGVQPEDEAEYYCVLWYSNRWVFGGGTKLTVL

SEQ ID NO: 292 - protein, 986 aa, Artificial Sequence
  Synthetic peptide
QVQLVESGGGLVKPGESLRLSCAASGFTFSDYYMYWVRQAPGKCLEWVAIISDGGYYTYYSDIIKGRFTISRDNAKNSLYLQMNSLKAEDTAVYYCARGFPLLRHGAMDYWGQGTLVTVSSGGGGSGGGGSGGGGSDIQMTQSPSSLSASVGDRVTITCKASQNVDTNVAWYQQKPGQAPKSLIYSASYRYSDVPSRFSGSASGTDFTLTISSVQSEDFATYYCQQYDAPMGTFGCGTKLEIKSGGGGSEVQLVESGGGLVQPGGSLKLSCAASGFTFNKYAMNWVRQAPGKGLEWVARIRSKYNNYATYYADSVKDRFTISRDDSKNTAYLQMNNLKTEDTAVYYCVRHGNFGNSYISYWAYWGQGTLVTVSSGGGGSGGGGSGGGGSQTVVTQEPSLTVSPGGTVTLTCGSSTGAVTSGNYPNWVQQKPGQAPRGLIGGTKFLAPGTPARFSGSLLGGKAALTLSGVQPEDEAEYYCVLWYSNRWVFGGGTKLTVLGGGGDKTHTCPPCPAPELLGGPSVFLFPPKPKDTLMISRTPEVTCVVVDVSHEDPEVKFNWYVDGVEVHNAKTKPCEEQYGSTYRCVSVLTVLHQDWLNGKEYKCKVSNKALPAPIEKTISKAKGQPREPQVYTLPPSREEMTKNQVSLTCLVKGFYPSDIAVEWESNGQPENNYKTTPPVLDSDGSFFLYSKLTVDKSRWQQGNVFSCSVMHEALHNHYTQKSLSLSPGKGGGGSGGGGSGGGGSGGGGSGGGGSGGGGSDKTHTCPPCPAPELLGGPSVFLFPPKPKDTLMISRTPEVTCVVVDVSHEDPEVKFNWYVDGVEVHNAKTKPCEEQYGSTYRCVSVLTVLHQDWLNGKEYKCKVSNKALPAPIEKTISKAKGQPREPQVYTLPPSREEMTKNQVSLTCLVKGFYPSDIAVEWESNGQPENNYKTTPPVLDSDGSFFLYSKLTVDKSRWQQGNVFSCSVMHEALHNHYTQKSLSLSPGK

SEQ ID NO: 293 - protein, 984 aa, Artificial Sequence
  Synthetic peptide
QVQLVESGGGLVKPGESLRLSCAASGFTFSDYYMYWVRQAPGKCLEWVAIISDGGYYTYYSDIIKGRFTISRDNAKNSLYLQMNSLKAEDTAVYYCARGFPLLRHGAMDYWGQGTLVTVSSGGGGSGGGGSGGGGSDIQMTQSPSSLSASVGDRVTITCKASQNVDTNVAWYQQKPGQAPKSLIYSASYRYSDVPSRFSGSASGTDFTLTISSVQSEDFATYYCQQYDAPMGTFGCGTKLEIKSGGGGSEVQLVESGGGLVQPGGSLKLSCAASGFTFNKYAMNWVRQAPGKGLEWVARIRSKYNNYATYYADSVKDRFTISRDDSKNTAYLQMNNLKTEDTAVYYCVRHGNFGNSYISYWAYWGQGTLVTVSSGGGGSGGGGSGGGGSQTVVTQEPSLTVSPGGTVTLTCGSSTGAVTSGNYPNWVQQKPGQAPRGLIGGTKFLAPGTPARFSGSLLGGKAALTLSGVQPEDEAEYYCVLWYSNRWVFGGGTKLTVLGGGGDKTHTCPPCPAPELLGGPSVFLFPPKPKDTLMISRTPEVTCVVVDVSHEDPEVKFNWYVDGVEVHNAKTKPCEEQYGSTYRCVSVLTVLHQDWLNGKEYKCKVSNKALPAPIEKTISKAKGQPREPQVYTLPPSREEMTKNQVSLTCLVKGFYPSDIAVEWESNGQPENNYKTTPPVLDSDGSFFLYSKLTVDKSRWQQGNVFSCSVMHEALHNHYTQKSLSLSPGGGGSGGGGSGGGGSGGGGSGGGGSGGGGSDKTHTCPPCPAPELLGGPSVFLFPPKPKDTLMISRTPEVTCVVVDVSHEDPEVKFNWYVDGVEVHNAKTKPCEEQYGSTYRCVSVLTVLHQDWLNGKEYKCKVSNKALPAPIEKTISKAKGQPREPQVYTLPPSREEMTKNQVSLTCLVKGFYPSDIAVEWESNGQPENNYKTTPPVLDSDGSFFLYSKLTVDKSRWQQGNVFSCSVMHEALHNHYTQKSLSLSPGK

SEQ ID NO: 294 - protein, 5 aa, Artificial Sequence
  Synthetic peptide
DYYMN

SEQ ID NO: 295 - protein, 17 aa, Artificial Sequence
  Synthetic peptide
IISDNKHQTYYSDIIKG

SEQ ID NO: 296 - protein, 12 aa, Artificial Sequence
  Synthetic peptide
GFPLLRHGAMDY

SEQ ID NO: 297 - protein, 11 aa, Artificial Sequence
  Synthetic peptide
KASQNVDTNVA

SEQ ID NO: 298 - protein, 7 aa, Artificial Sequence
  Synthetic peptide
SASYRYS

SEQ ID NO: 299 - protein, 9 aa, Artificial Sequence
  Synthetic peptide
QQYDSYPYT

SEQ ID NO: 300 - protein, 121 aa, Artificial Sequence
  Synthetic peptide
QVQLVESGGGLVKPGESLRLSCAASGFTFSDYYMNWVRQAPGKGLEWVAIISDNKHQTYYSDIIKGRFAISRDNAKNSLYLQMNSLKAEDTAVYYCARGFPLLRHGAMDYWGQGTLVTVSS

SEQ ID NO: 301 - protein, 107 aa, Artificial Sequence; identical to SEQ ID NO: 49
  Synthetic peptide

SEQ ID NO: 302 - protein, 243 aa, Artificial Sequence
  Synthetic peptide
QVQLVESGGGLVKPGESLRLSCAASGFTFSDYYMNWVRQAPGKGLEWVAIISDNKHQTYYSDIIKGRFAISRDNAKNSLYLQMNSLKAEDTAVYYCARGFPLLRHGAMDYWGQGTLVTVSSGGGGSGGGGSGGGGSDIQMTQSPSSLSASVGDRVTITCKASQNVDTNVAWYQQKPGQAPKSLIYSASYRYSDVPSRFSGSASGTDFTLTISSLQSEDFATYYCQQYDSYPYTFGGGTKLEIK

SEQ ID NO: 303 - protein, 498 aa, Artificial Sequence
  Synthetic peptide
QVQLVESGGGLVKPGESLRLSCAASGFTFSDYYMNWVRQAPGKGLEWVAIISDNKHQTYYSDIIKGRFAISRDNAKNSLYLQMNSLKAEDTAVYYCARGFPLLRHGAMDYWGQGTLVTVSSGGGGSGGGGSGGGGSDIQMTQSPSSLSASVGDRVTITCKASQNVDTNVAWYQQKPGQAPKSLIYSASYRYSDVPSRFSGSASGTDFTLTISSLQSEDFATYYCQQYDSYPYTFGGGTKLEIKSGGGGSEVQLVESGGGLVQPGGSLKLSCAASGFTFNKYAMNWVRQAPGKGLEWVARIRSKYNNYATYYADSVKDRFTISRDDSKNTAYLQMNNLKTEDTAVYYCVRHGNFGNSYISYWAYWGQGTLVTVSSGGGGSGGGGSGGGGSQTVVTQEPSLTVSPGGTVTLTCGSSTGAVTSGNYPNWVQQKPGQAPRGLIGGTKFLAPGTPARFSGSLLGGKAALTLSGVQPEDEAEYYCVLWYSNRWVFGGGTKLTVL

SEQ ID NO: 304 - protein, 986 aa, Artificial Sequence
  Synthetic peptide
QVQLVESGGGLVKPGESLRLSCAASGFTFSDYYMNWVRQAPGKGLEWVAIISDNKHQTYYSDIIKGRFAISRDNAKNSLYLQMNSLKAEDTAVYYCARGFPLLRHGAMDYWGQGTLVTVSSGGGGSGGGGSGGGGSDIQMTQSPSSLSASVGDRVTITCKASQNVDTNVAWYQQKPGQAPKSLIYSASYRYSDVPSRFSGSASGTDFTLTISSLQSEDFATYYCQQYDSYPYTFGGGTKLEIKSGGGGSEVQLVESGGGLVQPGGSLKLSCAASGFTFNKYAMNWVRQAPGKGLEWVARIRSKYNNYATYYADSVKDRFTISRDDSKNTAYLQMNNLKTEDTAVYYCVRHGNFGNSYISYWAYWGQGTLVTVSSGGGGSGGGGSGGGGSQTVVTQEPSLTVSPGGTVTLTCGSSTGAVTSGNYPNWVQQKPGQAPRGLIGGTKFLAPGTPARFSGSLLGGKAALTLSGVQPEDEAEYYCVLWYSNRWVFGGGTKLTVLGGGGDKTHTCPPCPAPELLGGPSVFLFPPKPKDTLMISRTPEVTCVVVDVSHEDPEVKFNWYVDGVEVHNAKTKPCEEQYGSTYRCVSVLTVLHQDWLNGKEYKCKVSNKALPAPIEKTISKAKGQPREPQVYTLPPSREEMTKNQVSLTCLVKGFYPSDIAVEWESNGQPENNYKTTPPVLDSDGSFFLYSKLTVDKSRWQQGNVFSCSVMHEALHNHYTQKSLSLSPGKGGGGSGGGGSGGGGSGGGGSGGGGSGGGGSDKTHTCPPCPAPELLGGPSVFLFPPKPKDTLMISRTPEVTCVVVDVSHEDPEVKFNWYVDGVEVHNAKTKPCEEQYGSTYRCVSVLTVLHQDWLNGKEYKCKVSNKALPAPIEKTISKAKGQPREPQVYTLPPSREEMTKNQVSLTCLVKGFYPSDIAVEWESNGQPENNYKTTPPVLDSDGSFFLYSKLTVDKSRWQQGNVFSCSVMHEALHNHYTQKSLSLSPGK

SEQ ID NO: 305 - protein, 984 aa, Artificial Sequence
  Synthetic peptide
QVQLVESGGGLVKPGESLRLSCAASGFTFSDYYMNWVRQAPGKGLEWVAIISDNKHQTYYSDIIKGRFAISRDNAKNSLYLQMNSLKAEDTAVYYCARGFPLLRHGAMDYWGQGTLVTVSSGGGGSGGGGSGGGGSDIQMTQSPSSLSASVGDRVTITCKASQNVDTNVAWYQQKPGQAPKSLIYSASYRYSDVPSRFSGSASGTDFTLTISSLQSEDFATYYCQQYDSYPYTFGGGTKLEIKSGGGGSEVQLVESGGGLVQPGGSLKLSCAASGFTFNKYAMNWVRQAPGKGLEWVARIRSKYNNYATYYADSVKDRFTISRDDSKNTAYLQMNNLKTEDTAVYYCVRHGNFGNSYISYWAYWGQGTLVTVSSGGGGSGGGGSGGGGSQTVVTQEPSLTVSPGGTVTLTCGSSTGAVTSGNYPNWVQQKPGQAPRGLIGGTKFLAPGTPARFSGSLLGGKAALTLSGVQPEDEAEYYCVLWYSNRWVFGGGTKLTVLGGGGDKTHTCPPCPAPELLGGPSVFLFPPKPKDTLMISRTPEVTCVVVDVSHEDPEVKFNWYVDGVEVHNAKTKPCEEQYGSTYRCVSVLTVLHQDWLNGKEYKCKVSNKALPAPIEKTISKAKGQPREPQVYTLPPSREEMTKNQVSLTCLVKGFYPSDIAVEWESNGQPENNYKTTPPVLDSDGSFFLYSKLTVDKSRWQQGNVFSCSVMHEALHNHYTQKSLSLSPGGGGSGGGGSGGGGSGGGGSGGGGSGGGGSDKTHTCPPCPAPELLGGPSVFLFPPKPKDTLMISRTPEVTCVVVDVSHEDPEVKFNWYVDGVEVHNAKTKPCEEQYGSTYRCVSVLTVLHQDWLNGKEYKCKVSNKALPAPIEKTISKAKGQPREPQVYTLPPSREEMTKNQVSLTCLVKGFYPSDIAVEWESNGQPENNYKTTPPVLDSDGSFFLYSKLTVDKSRWQQGNVFSCSVMHEALHNHYTQKSLSLSPGK

SEQ ID NO: 306 - protein, 121 aa, Artificial Sequence
  Synthetic peptide
QVQLVESGGGLVKPGESLRLSCAASGFTFSDYYMNWVRQAPGKCLEWVAIISDNKHQTYYSDIIKGRFAISRDNAKNSLYLQMNSLKAEDTAVYYCARGFPLLRHGAMDYWGQGTLVTVSS

SEQ ID NO: 307 - protein, 107 aa, Artificial Sequence; identical to SEQ ID NO: 55
  Synthetic peptide

SEQ ID NO: 308 - protein, 243 aa, Artificial Sequence
  Synthetic peptide
QVQLVESGGGLVKPGESLRLSCAASGFTFSDYYMNWVRQAPGKCLEWVAIISDNKHQTYYSDIIKGRFAISRDNAKNSLYLQMNSLKAEDTAVYYCARGFPLLRHGAMDYWGQGTLVTVSSGGGGSGGGGSGGGGSDIQMTQSPSSLSASVGDRVTITCKASQNVDTNVAWYQQKPGQAPKSLIYSASYRYSDVPSRFSGSASGTDFTLTISSLQSEDFATYYCQQYDSYPYTFGCGTKLEIK

SEQ ID NO: 309 - protein, 498 aa, Artificial Sequence
  Synthetic peptide
QVQLVESGGGLVKPGESLRLSCAASGFTFSDYYMNWVRQAPGKCLEWVAIISDNKHQTYYSDIIKGRFAISRDNAKNSLYLQMNSLKAEDTAVYYCARGFPLLRHGAMDYWGQGTLVTVSSGGGGSGGGGSGGGGSDIQMTQSPSSLSASVGDRVTITCKASQNVDTNVAWYQQKPGQAPKSLIYSASYRYSDVPSRFSGSASGTDFTLTISSLQSEDFATYYCQQYDSYPYTFGCGTKLEIKSGGGGSEVQLVESGGGLVQPGGSLKLSCAASGFTFNKYAMNWVRQAPGKGLEWVARIRSKYNNYATYYADSVKDRFTISRDDSKNTAYLQMNNLKTEDTAVYYCVRHGNFGNSYISYWAYWGQGTLVTVSSGGGGSGGGGSGGGGSQTVVTQEPSLTVSPGGTVTLTCGSSTGAVTSGNYPNWVQQKPGQAPRGLIGGTKFLAPGTPARFSGSLLGGKAALTLSGVQPEDEAEYYCVLWYSNRWVFGGGTKLTVL

SEQ ID NO: 310 - protein, 986 aa, Artificial Sequence
  Synthetic peptide
QVQLVESGGGLVKPGESLRLSCAASGFTFSDYYMNWVRQAPGKCLEWVAIISDNKHQTYYSDIIKGRFAISRDNAKNSLYLQMNSLKAEDTAVYYCARGFPLLRHGAMDYWGQGTLVTVSSGGGGSGGGGSGGGGSDIQMTQSPSSLSASVGDRVTITCKASQNVDTNVAWYQQKPGQAPKSLIYSASYRYSDVPSRFSGSASGTDFTLTISSLQSEDFATYYCQQYDSYPYTFGCGTKLEIKSGGGGSEVQLVESGGGLVQPGGSLKLSCAASGFTFNKYAMNWVRQAPGKGLEWVARIRSKYNNYATYYADSVKDRFTISRDDSKNTAYLQMNNLKTEDTAVYYCVRHGNFGNSYISYWAYWGQGTLVTVSSGGGGSGGGGSGGGGSQTVVTQEPSLTVSPGGTVTLTCGSSTGAVTSGNYPNWVQQKPGQAPRGLIGGTKFLAPGTPARFSGSLLGGKAALTLSGVQPEDEAEYYCVLWYSNRWVFGGGTKLTVLGGGGDKTHTCPPCPAPELLGGPSVFLFPPKPKDTLMISRTPEVTCVVVDVSHEDPEVKFNWYVDGVEVHNAKTKPCEEQYGSTYRCVSVLTVLHQDWLNGKEYKCKVSNKALPAPIEKTISKAKGQPREPQVYTLPPSREEMTKNQVSLTCLVKGFYPSDIAVEWESNGQPENNYKTTPPVLDSDGSFFLYSKLTVDKSRWQQGNVFSCSVMHEALHNHYTQKSLSLSPGKGGGGSGGGGSGGGGSGGGGSGGGGSGGGGSDKTHTCPPCPAPELLGGPSVFLFPPKPKDTLMISRTPEVTCVVVDVSHEDPEVKFNWYVDGVEVHNAKTKPCEEQYGSTYRCVSVLTVLHQDWLNGKEYKCKVSNKALPAPIEKTISKAKGQPREPQVYTLPPSREEMTKNQVSLTCLVKGFYPSDIAVEWESNGQPENNYKTTPPVLDSDGSFFLYSKLTVDKSRWQQGNVFSCSVMHEALHNHYTQKSLSLSPGK

SEQ ID NO: 311 - protein, 984 aa, Artificial Sequence
  Synthetic peptide
QVQLVESGGGLVKPGESLRLSCAASGFTFSDYYMNWVRQAPGKCLEWVAIISDNKHQTYYSDIIKGRFAISRDNAKNSLYLQMNSLKAEDTAVYYCARGFPLLRHGAMDYWGQGTLVTVSSGGGGSGGGGSGGGGSDIQMTQSPSSLSASVGDRVTITCKASQNVDTNVAWYQQKPGQAPKSLIYSASYRYSDVPSRFSGSASGTDFTLTISSLQSEDFATYYCQQYDSYPYTFGCGTKLEIKSGGGGSEVQLVESGGGLVQPGGSLKLSCAASGFTFNKYAMNWVRQAPGKGLEWVARIRSKYNNYATYYADSVKDRFTISRDDSKNTAYLQMNNLKTEDTAVYYCVRHGNFGNSYISYWAYWGQGTLVTVSSGGGGSGGGGSGGGGSQTVVTQEPSLTVSPGGTVTLTCGSSTGAVTSGNYPNWVQQKPGQAPRGLIGGTKFLAPGTPARFSGSLLGGKAALTLSGVQPEDEAEYYCVLWYSNRWVFGGGTKLTVLGGGGDKTHTCPPCPAPELLGGPSVFLFPPKPKDTLMISRTPEVTCVVVDVSHEDPEVKFNWYVDGVEVHNAKTKPCEEQYGSTYRCVSVLTVLHQDWLNGKEYKCKVSNKALPAPIEKTISKAKGQPREPQVYTLPPSREEMTKNQVSLTCLVKGFYPSDIAVEWESNGQPENNYKTTPPVLDSDGSFFLYSKLTVDKSRWQQGNVFSCSVMHEALHNHYTQKSLSLSPGGGGSGGGGSGGGGSGGGGSGGGGSGGGGSDKTHTCPPCPAPELLGGPSVFLFPPKPKDTLMISRTPEVTCVVVDVSHEDPEVKFNWYVDGVEVHNAKTKPCEEQYGSTYRCVSVLTVLHQDWLNGKEYKCKVSNKALPAPIEKTISKAKGQPREPQVYTLPPSREEMTKNQVSLTCLVKGFYPSDIAVEWESNGQPENNYKTTPPVLDSDGSFFLYSKLTVDKSRWQQGNVFSCSVMHEALHNHYTQKSLSLSPGK

SEQ ID NO: 312 - protein, 5 aa, Artificial Sequence
  Synthetic peptide
DYYMY

SEQ ID NO: 313 - protein, 17 aa, Artificial Sequence
  Synthetic peptide
IISDAGYYTYYSDIIKG

SEQ ID NO: 314 - protein, 12 aa, Artificial Sequence
  Synthetic peptide
GFPLLRHGAMDY

SEQ ID NO: 315 - protein, 11 aa, Artificial Sequence
  Synthetic peptide
KASQNVDTNVA

SEQ ID NO: 316 - protein, 7 aa, Artificial Sequence
  Synthetic peptide
SASYRYS

SEQ ID NO: 317 - protein, 9 aa, Artificial Sequence
  Synthetic peptide
QQYESYPYT

SEQ ID NO: 318 - protein, 121 aa, Artificial Sequence
  Synthetic peptide
QVQLVESGGGLVKPGESLRLSCAASGFTFSDYYMYWVRQAPGKCLEWVAIISDAGYYTYYSDIIKGRFTISRDNAKNSLYLQMNSLKAEDTAVYYCARGFPLLRHGAMDYWGQGTLVTVSS

SEQ ID NO: 319 - protein, 107 aa, Artificial Sequence
  Synthetic peptide
DIQMTQSPSSLSASVGDRVTITCKASQNVDTNVAWYQQKPGQAPKSLIYSASYRYSDVPSRFSGSASGTDFTLTISSVQSEDFATYYCQQYESYPYTFGCGTKLEIK

SEQ ID NO: 320 - protein, 243 aa, Artificial Sequence
  Synthetic peptide
QVQLVESGGGLVKPGESLRLSCAASGFTFSDYYMYWVRQAPGKCLEWVAIISDAGYYTYYSDIIKGRFTISRDNAKNSLYLQMNSLKAEDTAVYYCARGFPLLRHGAMDYWGQGTLVTVSSGGGGSGGGGSGGGGSDIQMTQSPSSLSASVGDRVTITCKASQNVDTNVAWYQQKPGQAPKSLIYSASYRYSDVPSRFSGSASGTDFTLTISSVQSEDFATYYCQQYESYPYTFGCGTKLEIK

SEQ ID NO: 321 - protein, 498 aa, Artificial Sequence
  Synthetic peptide
QVQLVESGGGLVKPGESLRLSCAASGFTFSDYYMYWVRQAPGKCLEWVAIISDAGYYTYYSDIIKGRFTISRDNAKNSLYLQMNSLKAEDTAVYYCARGFPLLRHGAMDYWGQGTLVTVSSGGGGSGGGGSGGGGSDIQMTQSPSSLSASVGDRVTITCKASQNVDTNVAWYQQKPGQAPKSLIYSASYRYSDVPSRFSGSASGTDFTLTISSVQSEDFATYYCQQYESYPYTFGCGTKLEIKSGGGGSEVQLVESGGGLVQPGGSLKLSCAASGFTFNKYAMNWVRQAPGKGLEWVARIRSKYNNYATYYADSVKDRFTISRDDSKNTAYLQMNNLKTEDTAVYYCVRHGNFGNSYISYWAYWGQGTLVTVSSGGGGSGGGGSGGGGSQTVVTQEPSLTVSPGGTVTLTCGSSTGAVTSGNYPNWVQQKPGQAPRGLIGGTKFLAPGTPARFSGSLLGGKAALTLSGVQPEDEAEYYCVLWYSNRWVFGGGTKLTVL

SEQ ID NO: 322 - protein, 986 aa, Artificial Sequence
  Synthetic peptide
QVQLVESGGGLVKPGESLRLSCAASGFTFSDYYMYWVRQAPGKCLEWVAIISDAGYYTYYSDIIKGRFTISRDNAKNSLYLQMNSLKAEDTAVYYCARGFPLLRHGAMDYWGQGTLVTVSSGGGGSGGGGSGGGGSDIQMTQSPSSLSASVGDRVTITCKASQNVDTNVAWYQQKPGQAPKSLIYSASYRYSDVPSRFSGSASGTDFTLTISSVQSEDFATYYCQQYESYPYTFGCGTKLEIKSGGGGSEVQLVESGGGLVQPGGSLKLSCAASGFTFNKYAMNWVRQAPGKGLEWVARIRSKYNNYATYYADSVKDRFTISRDDSKNTAYLQMNNLKTEDTAVYYCVRHGNFGNSYISYWAYWGQGTLVTVSSGGGGSGGGGSGGGGSQTVVTQEPSLTVSPGGTVTLTCGSSTGAVTSGNYPNWVQQKPGQAPRGLIGGTKFLAPGTPARFSGSLLGGKAALTLSGVQPEDEAEYYCVLWYSNRWVFGGGTKLTVLGGGGDKTHTCPPCPAPELLGGPSVFLFPPKPKDTLMISRTPEVTCVVVDVSHEDPEVKFNWYVDGVEVHNAKTKPCEEQYGSTYRCVSVLTVLHQDWLNGKEYKCKVSNKALPAPIEKTISKAKGQPREPQVYTLPPSREEMTKNQVSLTCLVKGFYPSDIAVEWESNGQPENNYKTTPPVLDSDGSFFLYSKLTVDKSRWQQGNVFSCSVMHEALHNHYTQKSLSLSPGKGGGGSGGGGSGGGGSGGGGSGGGGSGGGGSDKTHTCPPCPAPELLGGPSVFLFPPKPKDTLMISRTPEVTCVVVDVSHEDPEVKFNWYVDGVEVHNAKTKPCEEQYGSTYRCVSVLTVLHQDWLNGKEYKCKVSNKALPAPIEKTISKAKGQPREPQVYTLPPSREEMTKNQVSLTCLVKGFYPSDIAVEWESNGQPENNYKTTPPVLDSDGSFFLYSKLTVDKSRWQQGNVFSCSVMHEALHNHYTQKSLSLSPGK

SEQ ID NO: 323 - protein, 984 aa, Artificial Sequence
  Synthetic peptide
QVQLVESGGGLVKPGESLRLSCAASGFTFSDYYMYWVRQAPGKCLEWVAIISDAGYYTYYSDIIKGRFTISRDNAKNSLYLQMNSLKAEDTAVYYCARGFPLLRHGAMDYWGQGTLVTVSSGGGGSGGGGSGGGGSDIQMTQSPSSLSASVGDRVTITCKASQNVDTNVAWYQQKPGQAPKSLIYSASYRYSDVPSRFSGSASGTDFTLTISSVQSEDFATYYCQQYESYPYTFGCGTKLEIKSGGGGSEVQLVESGGGLVQPGGSLKLSCAASGFTFNKYAMNWVRQAPGKGLEWVARIRSKYNNYATYYADSVKDRFTISRDDSKNTAYLQMNNLKTEDTAVYYCVRHGNFGNSYISYWAYWGQGTLVTVSSGGGGSGGGGSGGGGSQTVVTQEPSLTVSPGGTVTLTCGSSTGAVTSGNYPNWVQQKPGQAPRGLIGGTKFLAPGTPARFSGSLLGGKAALTLSGVQPEDEAEYYCVLWYSNRWVFGGGTKLTVLGGGGDKTHTCPPCPAPELLGGPSVFLFPPKPKDTLMISRTPEVTCVVVDVSHEDPEVKFNWYVDGVEVHNAKTKPCEEQYGSTYRCVSVLTVLHQDWLNGKEYKCKVSNKALPAPIEKTISKAKGQPREPQVYTLPPSREEMTKNQVSLTCLVKGFYPSDIAVEWESNGQPENNYKTTPPVLDSDGSFFLYSKLTVDKSRWQQGNVFSCSVMHEALHNHYTQKSLSLSPGGGGSGGGGSGGGGSGGGGSGGGGSGGGGSDKTHTCPPCPAPELLGGPSVFLFPPKPKDTLMISRTPEVTCVVVDVSHEDPEVKFNWYVDGVEVHNAKTKPCEEQYGSTYRCVSVLTVLHQDWLNGKEYKCKVSNKALPAPIEKTISKAKGQPREPQVYTLPPSREEMTKNQVSLTCLVKGFYPSDIAVEWESNGQPENNYKTTPPVLDSDGSFFLYSKLTVDKSRWQQGNVFSCSVMHEALHNHYTQKSLSLSPGK

SEQ ID NO: 324 - protein, 498 aa, Artificial Sequence
  Synthetic peptide
QVQLVESGGGLVKPGESLRLSCAASGFTFSDYYMYWVRQAPGKCLEWVAIISDAGYYTYYSDIIKGRFTISRDNAKNSLYLQMNSLKAEDTAVYYCARGFPLLRHGAMDYWGQGTLVTVSSGGGGSGGGGSGGGGSDIQMTQSPSSLSASVGDRVTITCKASQNVDTNVAWYQQKPGQAPKSLIYSASYRYSDVPSRFSGSASGTDFTLTISSVQSEDFATYYCQQYESYPYTFGCGTKLEIKSGGGGSEVQLVESGGGLVQPGGSLKLSCAASGFTFNKYAMNWVRQAPGKGLEWVARIRSKYNNYATYYADSVKDRFTISRDDSKNTAYLQMNNLKTEDTAVYYCVRHGNFGNSYISYWAYCGQGTLVTVSSGGGGSGGGGSGGGGSQTVVTQEPSLTVSPGGTVTLTCGSSTGAVTSGNYPNWVQQKPGQCPRGLIGGTKFLAPGTPARFSGSLLGGKAALTLSGVQPEDEAEYYCVLWYSNRWVFGGGTKLTVL

SEQ ID NO: 325 - protein, 986 aa, Artificial Sequence
  Synthetic peptide
QVQLVESGGGLVKPGESLRLSCAASGFTFSDYYMYWVRQAPGKCLEWVAIISDAGYYTYYSDIIKGRFTISRDNAKNSLYLQMNSLKAEDTAVYYCARGFPLLRHGAMDYWGQGTLVTVSSGGGGSGGGGSGGGGSDIQMTQSPSSLSASVGDRVTITCKASQNVDTNVAWYQQKPGQAPKSLIYSASYRYSDVPSRFSGSASGTDFTLTISSVQSEDFATYYCQQYESYPYTFGCGTKLEIKSGGGGSEVQLVESGGGLVQPGGSLKLSCAASGFTFNKYAMNWVRQAPGKGLEWVARIRSKYNNYATYYADSVKDRFTISRDDSKNTAYLQMNNLKTEDTAVYYCVRHGNFGNSYISYWAYCGQGTLVTVSSGGGGSGGGGSGGGGSQTVVTQEPSLTVSPGGTVTLTCGSSTGAVTSGNYPNWVQQKPGQCPRGLIGGTKFLAPGTPARFSGSLLGGKAALTLSGVQPEDEAEYYCVLWYSNRWVFGGGTKLTVLGGGGDKTHTCPPCPAPELLGGPSVFLFPPKPKDTLMISRTPEVTCVVVDVSHEDPEVKFNWYVDGVEVHNAKTKPCEEQYGSTYRCVSVLTVLHQDWLNGKEYKCKVSNKALPAPIEKTISKAKGQPREPQVYTLPPSREEMTKNQVSLTCLVKGFYPSDIAVEWESNGQPENNYKTTPPVLDSDGSFFLYSKLTVDKSRWQQGNVFSCSVMHEALHNHYTQKSLSLSPGKGGGGSGGGGSGGGGSGGGGSGGGGSGGGGSDKTHTCPPCPAPELLGGPSVFLFPPKPKDTLMISRTPEVTCVVVDVSHEDPEVKFNWYVDGVEVHNAKTKPCEEQYGSTYRCVSVLTVLHQDWLNGKEYKCKVSNKALPAPIEKTISKAKGQPREPQVYTLPPSREEMTKNQVSLTCLVKGFYPSDIAVEWESNGQPENNYKTTPPVLDSDGSFFLYSKLTVDKSRWQQGNVFSCSVMHEALHNHYTQKSLSLSPGK

SEQ ID NO: 326 - protein, 984 aa, Artificial Sequence
  Synthetic peptide
QVQLVESGGGLVKPGESLRLSCAASGFTFSDYYMYWVRQAPGKCLEWVAIISDAGYYTYYSDIIKGRFTISRDNAKNSLYLQMNSLKAEDTAVYYCARGFPLLRHGAMDYWGQGTLVTVSSGGGGSGGGGSGGGGSDIQMTQSPSSLSASVGDRVTITCKASQNVDTNVAWYQQKPGQAPKSLIYSASYRYSDVPSRFSGSASGTDFTLTISSVQSEDFATYYCQQYESYPYTFGCGTKLEIKSGGGGSEVQLVESGGGLVQPGGSLKLSCAASGFTFNKYAMNWVRQAPGKGLEWVARIRSKYNNYATYYADSVKDRFTISRDDSKNTAYLQMNNLKTEDTAVYYCVRHGNFGNSYISYWAYCGQGTLVTVSSGGGGSGGGGSGGGGSQTVVTQEPSLTVSPGGTVTLTCGSSTGAVTSGNYPNWVQQKPGQCPRGLIGGTKFLAPGTPARFSGSLLGGKAALTLSGVQPEDEAEYYCVLWYSNRWVFGGGTKLTVLGGGGDKTHTCPPCPAPELLGGPSVFLFPPKPKDTLMISRTPEVTCVVVDVSHEDPEVKFNWYVDGVEVHNAKTKPCEEQYGSTYRCVSVLTVLHQDWLNGKEYKCKVSNKALPAPIEKTISKAKGQPREPQVYTLPPSREEMTKNQVSLTCLVKGFYPSDIAVEWESNGQPENNYKTTPPVLDSDGSFFLYSKLTVDKSRWQQGNVFSCSVMHEALHNHYTQKSLSLSPGGGGSGGGGSGGGGSGGGGSGGGGSGGGGSDKTHTCPPCPAPELLGGPSVFLFPPKPKDTLMISRTPEVTCVVVDVSHEDPEVKFNWYVDGVEVHNAKTKPCEEQYGSTYRCVSVLTVLHQDWLNGKEYKCKVSNKALPAPIEKTISKAKGQPREPQVYTLPPSREEMTKNQVSLTCLVKGFYPSDIAVEWESNGQPENNYKTTPPVLDSDGSFFLYSKLTVDKSRWQQGNVFSCSVMHEALHNHYTQKSLSLSPGK

SEQ ID NO: 327 - protein, 5 aa, Artificial Sequence
  Synthetic peptide
DYYMY

SEQ ID NO: 328 - protein, 17 aa, Artificial Sequence
  Synthetic peptide
IISDGGYYTYYSDIIKG

SEQ ID NO: 329 - protein, 12 aa, Artificial Sequence
  Synthetic peptide
GFPLLRHGAMDY

SEQ ID NO: 330 - protein, 11 aa, Artificial Sequence
  Synthetic peptide
KASQNVDTNVA

SEQ ID NO: 331 - protein, 7 aa, Artificial Sequence
  Synthetic peptide
SASYRYS

SEQ ID NO: 332 - protein, 9 aa, Artificial Sequence
  Synthetic peptide
QQYDQQLIT

SEQ ID NO: 333 - protein, 121 aa, Artificial Sequence; identical to SEQ ID NO: 156
  Synthetic peptide

SEQ ID NO: 334 - protein, 107 aa, Artificial Sequence; identical to SEQ ID NO: 157
  Synthetic peptide

SEQ ID NO: 335 - protein, 243 aa, Artificial Sequence; identical to SEQ ID NO: 158
  Synthetic peptide

SEQ ID NO: 336 - protein, 498 aa, Artificial Sequence; identical to SEQ ID NO: 159
  Synthetic peptide

SEQ ID NO: 337 - protein, 986 aa, Artificial Sequence; identical to SEQ ID NO: 160
  Synthetic peptide

SEQ ID NO: 338 - protein, 984 aa, Artificial Sequence; identical to SEQ ID NO: 161
  Synthetic peptide

SEQ ID NO: 339 - protein, 498 aa, Artificial Sequence
  Synthetic peptide
QVQLVESGGGLVKPGESLRLSCAASGFTFSDYYMYWVRQAPGKGLEWVAIISDGGYYTYYSDIIKGRFTISRDNAKNSLYLQMNSLKAEDTAVYYCARGFPLLRHGAMDYWGQGTLVTVSSGGGGSGGGGSGGGGSDIQMTQSPSSLSASVGDRVTITCKASQNVDTNVAWYQQKPGQAPKSLIYSASYRYSDVPSRFSGSASGTDFTLTISSVQSEDFATYYCQQYDQQLITFGGGTKLEIKSGGGGSEVQLVESGGGLVQPGGSLKLSCAASGFTFNKYAMNWVRQAPGKGLEWVARIRSKYNNYATYYADSVKDRFTISRDDSKNTAYLQMNNLKTEDTAVYYCVRHGNFGNSYISYWAYCGQGTLVTVSSGGGGSGGGGSGGGGSQTVVTQEPSLTVSPGGTVTLTCGSSTGAVTSGNYPNWVQQKPGQCPRGLIGGTKFLAPGTPARFSGSLLGGKAALTLSGVQPEDEAEYYCVLWYSNRWVFGGGTKLTVL

SEQ ID NO: 340 - protein, 986 aa, Artificial Sequence
  Synthetic peptide
QVQLVESGGGLVKPGESLRLSCAASGFTFSDYYMYWVRQAPGKGLEWVAIISDGGYYTYYSDIIKGRFTISRDNAKNSLYLQMNSLKAEDTAVYYCARGFPLLRHGAMDYWGQGTLVTVSSGGGGSGGGGSGGGGSDIQMTQSPSSLSASVGDRVTITCKASQNVDTNVAWYQQKPGQAPKSLIYSASYRYSDVPSRFSGSASGTDFTLTISSVQSEDFATYYCQQYDQQLITFGGGTKLEIKSGGGGSEVQLVESGGGLVQPGGSLKLSCAASGFTFNKYAMNWVRQAPGKGLEWVARIRSKYNNYATYYADSVKDRFTISRDDSKNTAYLQMNNLKTEDTAVYYCVRHGNFGNSYISYWAYCGQGTLVTVSSGGGGSGGGGSGGGGSQTVVTQEPSLTVSPGGTVTLTCGSSTGAVTSGNYPNWVQQKPGQCPRGLIGGTKFLAPGTPARFSGSLLGGKAALTLSGVQPEDEAEYYCVLWYSNRWVFGGGTKLTVLGGGGDKTHTCPPCPAPELLGGPSVFLFPPKPKDTLMISRTPEVTCVVVDVSHEDPEVKFNWYVDGVEVHNAKTKPCEEQYGSTYRCVSVLTVLHQDWLNGKEYKCKVSNKALPAPIEKTISKAKGQPREPQVYTLPPSREEMTKNQVSLTCLVKGFYPSDIAVEWESNGQPENNYKTTPPVLDSDGSFFLYSKLTVDKSRWQQGNVFSCSVMHEALHNHYTQKSLSLSPGKGGGGSGGGGSGGGGSGGGGSGGGGSGGGGSDKTHTCPPCPAPELLGGPSVFLFPPKPKDTLMISRTPEVTCVVVDVSHEDPEVKFNWYVDGVEVHNAKTKPCEEQYGSTYRCVSVLTVLHQDWLNGKEYKCKVSNKALPAPIEKTISKAKGQPREPQVYTLPPSREEMTKNQVSLTCLVKGFYPSDIAVEWESNGQPENNYKTTPPVLDSDGSFFLYSKLTVDKSRWQQGNVFSCSVMHEALHNHYTQKSLSLSPGK

SEQ ID NO: 341 - protein, 984 aa, Artificial Sequence
  Synthetic peptide
QVQLVESGGGLVKPGESLRLSCAASGFTFSDYYMYWVRQAPGKGLEWVAIISDGGYYTYYSDIIKGRFTISRDNAKNSLYLQMNSLKAEDTAVYYCARGFPLLRHGAMDYWGQGTLVTVSSGGGGSGGGGSGGGGSDIQMTQSPSSLSASVGDRVTITCKASQNVDTNVAWYQQKPGQAPKSLIYSASYRYSDVPSRFSGSASGTDFTLTISSVQSEDFATYYCQQYDQQLITFGGGTKLEIKSGGGGSEVQLVESGGGLVQPGGSLKLSCAASGFTFNKYAMNWVRQAPGKGLEWVARIRSKYNNYATYYADSVKDRFTISRDDSKNTAYLQMNNLKTEDTAVYYCVRHGNFGNSYISYWAYCGQGTLVTVSSGGGGSGGGGSGGGGSQTVVTQEPSLTVSPGGTVTLTCGSSTGAVTSGNYPNWVQQKPGQCPRGLIGGTKFLAPGTPARFSGSLLGGKAALTLSGVQPEDEAEYYCVLWYSNRWVFGGGTKLTVLGGGGDKTHTCPPCPAPELLGGPSVFLFPPKPKDTLMISRTPEVTCVVVDVSHEDPEVKFNWYVDGVEVHNAKTKPCEEQYGSTYRCVSVLTVLHQDWLNGKEYKCKVSNKALPAPIEKTISKAKGQPREPQVYTLPPSREEMTKNQVSLTCLVKGFYPSDIAVEWESNGQPENNYKTTPPVLDSDGSFFLYSKLTVDKSRWQQGNVFSCSVMHEALHNHYTQKSLSLSPGGGGSGGGGSGGGGSGGGGSGGGGSGGGGSDKTHTCPPCPAPELLGGPSVFLFPPKPKDTLMISRTPEVTCVVVDVSHEDPEVKFNWYVDGVEVHNAKTKPCEEQYGSTYRCVSVLTVLHQDWLNGKEYKCKVSNKALPAPIEKTISKAKGQPREPQVYTLPPSREEMTKNQVSLTCLVKGFYPSDIAVEWESNGQPENNYKTTPPVLDSDGSFFLYSKLTVDKSRWQQGNVFSCSVMHEALHNHYTQKSLSLSPGK

SEQ ID NO: 342 - protein, 5 aa, Artificial Sequence
  Synthetic peptide
DYYMY

SEQ ID NO: 343 - protein, 17 aa, Artificial Sequence
  Synthetic peptide
IISDGGYYTYYSDIIKG

SEQ ID NO: 344 - protein, 12 aa, Artificial Sequence
  Synthetic peptide
GFPLLRHGAMDY

SEQ ID NO: 345 - protein, 11 aa, Artificial Sequence
  Synthetic peptide
KASQNVDTNVA

SEQ ID NO: 346 - protein, 7 aa, Artificial Sequence
  Synthetic peptide
SASYRYS

SEQ ID NO: 347 - protein, 9 aa, Artificial Sequence
  Synthetic peptide
QQYDQQLIT

SEQ ID NO: 348 - protein, 121 aa, Artificial Sequence; identical to SEQ ID NO: 162
  Synthetic peptide

SEQ ID NO: 349 - protein, 107 aa, Artificial Sequence; identical to SEQ ID NO: 163
  Synthetic peptide

SEQ ID NO: 350 - protein, 243 aa, Artificial Sequence; identical to SEQ ID NO: 164
  Synthetic peptide

SEQ ID NO: 351 - protein, 498 aa, Artificial Sequence; identical to SEQ ID NO: 165
  Synthetic peptide

SEQ ID NO: 352 - protein, 986 aa, Artificial Sequence; identical to SEQ ID NO: 166
  Synthetic peptide

SEQ ID NO: 353 - protein, 984 aa, Artificial Sequence; identical to SEQ ID NO: 167
  Synthetic peptide

SEQ ID NO: 354 - protein, 498 aa, Artificial Sequence
  Synthetic peptide
QVQLVESGGGLVKPGESLRLSCAASGFTFSDYYMYWVRQAPGKCLEWVAIISDGGYYTYYSDIIKGRFTISRDNAKNSLYLQMNSLKAEDTAVYYCARGFPLLRHGAMDYWGQGTLVTVSSGGGGSGGGGSGGGGSDIQMTQSPSSLSASVGDRVTITCKASQNVDTNVAWYQQKPGQAPKSLIYSASYRYSDVPSRFSGSASGTDFTLTISSVQSEDFATYYCQQYDQQLITFGCGTKLEIKSGGGGSEVQLVESGGGLVQPGGSLKLSCAASGFTFNKYAMNWVRQAPGKGLEWVARIRSKYNNYATYYADSVKDRFTISRDDSKNTAYLQMNNLKTEDTAVYYCVRHGNFGNSYISYWAYCGQGTLVTVSSGGGGSGGGGSGGGGSQTVVTQEPSLTVSPGGTVTLTCGSSTGAVTSGNYPNWVQQKPGQCPRGLIGGTKFLAPGTPARFSGSLLGGKAALTLSGVQPEDEAEYYCVLWYSNRWVFGGGTKLTVL

SEQ ID NO: 355 - protein, 986 aa, Artificial Sequence
  Synthetic peptide
QVQLVESGGGLVKPGESLRLSCAASGFTFSDYYMYWVRQAPGKCLEWVAIISDGGYYTYYSDIIKGRFTISRDNAKNSLYLQMNSLKAEDTAVYYCARGFPLLRHGAMDYWGQGTLVTVSSGGGGSGGGGSGGGGSDIQMTQSPSSLSASVGDRVTITCKASQNVDTNVAWYQQKPGQAPKSLIYSASYRYSDVPSRFSGSASGTDFTLTISSVQSEDFATYYCQQYDQQLITFGCGTKLEIKSGGGGSEVQLVESGGGLVQPGGSLKLSCAASGFTFNKYAMNWVRQAPGKGLEWVARIRSKYNNYATYYADSVKDRFTISRDDSKNTAYLQMNNLKTEDTAVYYCVRHGNFGNSYISYWAYCGQGTLVTVSSGGGGSGGGGSGGGGSQTVVTQEPSLTVSPGGTVTLTCGSSTGAVTSGNYPNWVQQKPGQCPRGLIGGTKFLAPGTPARFSGSLLGGKAALTLSGVQPEDEAEYYCVLWYSNRWVFGGGTKLTVLGGGGDKTHTCPPCPAPELLGGPSVFLFPPKPKDTLMISRTPEVTCVVVDVSHEDPEVKFNWYVDGVEVHNAKTKPCEEQYGSTYRCVSVLTVLHQDWLNGKEYKCKVSNKALPAPIEKTISKAKGQPREPQVYTLPPSREEMTKNQVSLTCLVKGFYPSDIAVEWESNGQPENNYKTTPPVLDSDGSFFLYSKLTVDKSRWQQGNVFSCSVMHEALHNHYTQKSLSLSPGKGGGGSGGGGSGGGGSGGGGSGGGGSGGGGSDKTHTCPPCPAPELLGGPSVFLFPPKPKDTLMISRTPEVTCVVVDVSHEDPEVKFNWYVDGVEVHNAKTKPCEEQYGSTYRCVSVLTVLHQDWLNGKEYKCKVSNKALPAPIEKTISKAKGQPREPQVYTLPPSREEMTKNQVSLTCLVKGFYPSDIAVEWESNGQPENNYKTTPPVLDSDGSFFLYSKLTVDKSRWQQGNVFSCSVMHEALHNHYTQKSLSLSPGK

SEQ ID NO: 356 - protein, 984 aa, Artificial Sequence
  Synthetic peptide
QVQLVESGGGLVKPGESLRLSCAASGFTFSDYYMYWVRQAPGKCLEWVAIISDGGYYTYYSDIIKGRFTISRDNAKNSLYLQMNSLKAEDTAVYYCARGFPLLRHGAMDYWGQGTLVTVSSGGGGSGGGGSGGGGSDIQMTQSPSSLSASVGDRVTITCKASQNVDTNVAWYQQKPGQAPKSLIYSASYRYSDVPSRFSGSASGTDFTLTISSVQSEDFATYYCQQYDQQLITFGCGTKLEIKSGGGGSEVQLVESGGGLVQPGGSLKLSCAASGFTFNKYAMNWVRQAPGKGLEWVARIRSKYNNYATYYADSVKDRFTISRDDSKNTAYLQMNNLKTEDTAVYYCVRHGNFGNSYISYWAYCGQGTLVTVSSGGGGSGGGGSGGGGSQTVVTQEPSLTVSPGGTVTLTCGSSTGAVTSGNYPNWVQQKPGQCPRGLIGGTKFLAPGTPARFSGSLLGGKAALTLSGVQPEDEAEYYCVLWYSNRWVFGGGTKLTVLGGGGDKTHTCPPCPAPELLGGPSVFLFPPKPKDTLMISRTPEVTCVVVDVSHEDPEVKFNWYVDGVEVHNAKTKPCEEQYGSTYRCVSVLTVLHQDWLNGKEYKCKVSNKALPAPIEKTISKAKGQPREPQVYTLPPSREEMTKNQVSLTCLVKGFYPSDIAVEWESNGQPENNYKTTPPVLDSDGSFFLYSKLTVDKSRWQQGNVFSCSVMHEALHNHYTQKSLSLSPGGGGSGGGGSGGGGSGGGGSGGGGSGGGGSDKTHTCPPCPAPELLGGPSVFLFPPKPKDTLMISRTPEVTCVVVDVSHEDPEVKFNWYVDGVEVHNAKTKPCEEQYGSTYRCVSVLTVLHQDWLNGKEYKCKVSNKALPAPIEKTISKAKGQPREPQVYTLPPSREEMTKNQVSLTCLVKGFYPSDIAVEWESNGQPENNYKTTPPVLDSDGSFFLYSKLTVDKSRWQQGNVFSCSVMHEALHNHYTQKSLSLSPGK

SEQ ID NO: 357 - protein, 5 aa, Artificial Sequence
  Synthetic peptide
DYYMY

SEQ ID NO: 358 - protein, 17 aa, Artificial Sequence
  Synthetic peptide
IISDGGYYTYYSDIIKG

SEQ ID NO: 359 - protein, 12 aa, Artificial Sequence
  Synthetic peptide
GFPLLRHGAMDY

SEQ ID NO: 360 - protein, 11 aa, Artificial Sequence
  Synthetic peptide
KASQNVDTNVA

SEQ ID NO: 361 - protein, 7 aa, Artificial Sequence
  Synthetic peptide
SASYVYW

SEQ ID NO: 362 - protein, 9 aa, Artificial Sequence
  Synthetic peptide
QQYDQQLIT

SEQ ID NO: 363 - protein, 121 aa, Artificial Sequence; identical to SEQ ID NO: 156
  Synthetic peptide

SEQ ID NO: 364 - protein, 107 aa, Artificial Sequence
  Synthetic peptide
DIQMTQSPSSLSASVGDRVTITCKASQNVDTNVAWYQQKPGQAPKSLIYSASYVYWDVPSRFSGSASGTDFTLTISSVQSEDFATYYCQQYDQQLITFGGGTKLEIK

SEQ ID NO: 365 - protein, 243 aa, Artificial Sequence
  Synthetic peptide
QVQLVESGGGLVKPGESLRLSCAASGFTFSDYYMYWVRQAPGKGLEWVAIISDGGYYTYYSDIIKGRFTISRDNAKNSLYLQMNSLKAEDTAVYYCARGFPLLRHGAMDYWGQGTLVTVSSGGGGSGGGGSGGGGSDIQMTQSPSSLSASVGDRVTITCKASQNVDTNVAWYQQKPGQAPKSLIYSASYVYWDVPSRFSGSASGTDFTLTISSVQSEDFATYYCQQYDQQLITFGGGTKLEIK

SEQ ID NO: 366 - protein, 498 aa, Artificial Sequence
  Synthetic peptide
QVQLVESGGGLVKPGESLRLSCAASGFTFSDYYMYWVRQAPGKGLEWVAIISDGGYYTYYSDIIKGRFTISRDNAKNSLYLQMNSLKAEDTAVYYCARGFPLLRHGAMDYWGQGTLVTVSSGGGGSGGGGSGGGGSDIQMTQSPSSLSASVGDRVTITCKASQNVDTNVAWYQQKPGQAPKSLIYSASYVYWDVPSRFSGSASGTDFTLTISSVQSEDFATYYCQQYDQQLITFGGGTKLEIKSGGGGSEVQLVESGGGLVQPGGSLKLSCAASGFTFNKYAMNWVRQAPGKGLEWVARIRSKYNNYATYYADSVKDRFTISRDDSKNTAYLQMNNLKTEDTAVYYCVRHGNFGNSYISYWAYWGQGTLVTVSSGGGGSGGGGSGGGGSQTVVTQEPSLTVSPGGTVTLTCGSSTGAVTSGNYPNWVQQKPGQAPRGLIGGTKFLAPGTPARFSGSLLGGKAALTLSGVQPEDEAEYYCVLWYSNRWVFGGGTKLTVL

SEQ ID NO: 367 - protein, 986 aa, Artificial Sequence
  Synthetic peptide
QVQLVESGGGLVKPGESLRLSCAASGFTFSDYYMYWVRQAPGKGLEWVAIISDGGYYTYYSDIIKGRFTISRDNAKNSLYLQMNSLKAEDTAVYYCARGFPLLRHGAMDYWGQGTLVTVSSGGGGSGGGGSGGGGSDIQMTQSPSSLSASVGDRVTITCKASQNVDTNVAWYQQKPGQAPKSLIYSASYVYWDVPSRFSGSASGTDFTLTISSVQSEDFATYYCQQYDQQLITFGGGTKLEIKSGGGGSEVQLVESGGGLVQPGGSLKLSCAASGFTFNKYAMNWVRQAPGKGLEWVARIRSKYNNYATYYADSVKDRFTISRDDSKNTAYLQMNNLKTEDTAVYYCVRHGNFGNSYISYWAYWGQGTLVTVSSGGGGSGGGGSGGGGSQTVVTQEPSLTVSPGGTVTLTCGSSTGAVTSGNYPNWVQQKPGQAPRGLIGGTKFLAPGTPARFSGSLLGGKAALTLSGVQPEDEAEYYCVLWYSNRWVFGGGTKLTVLGGGGDKTHTCPPCPAPELLGGPSVFLFPPKPKDTLMISRTPEVTCVVVDVSHEDPEVKFNWYVDGVEVHNAKTKPCEEQYGSTYRCVSVLTVLHQDWLNGKEYKCKVSNKALPAPIEKTISKAKGQPREPQVYTLPPSREEMTKNQVSLTCLVKGFYPSDIAVEWESNGQPENNYKTTPPVLDSDGSFFLYSKLTVDKSRWQQGNVFSCSVMHEALHNHYTQKSLSLSPGKGGGGSGGGGSGGGGSGGGGSGGGGSGGGGSDKTHTCPPCPAPELLGGPSVFLFPPKPKDTLMISRTPEVTCVVVDVSHEDPEVKFNWYVDGVEVHNAKTKPCEEQYGSTYRCVSVLTVLHQDWLNGKEYKCKVSNKALPAPIEKTISKAKGQPREPQVYTLPPSREEMTKNQVSLTCLVKGFYPSDIAVEWESNGQPENNYKTTPPVLDSDGSFFLYSKLTVDKSRWQQGNVFSCSVMHEALHNHYTQKSLSLSPGK

SEQ ID NO: 368 - protein, 984 aa, Artificial Sequence
  Synthetic peptide
QVQLVESGGGLVKPGESLRLSCAASGFTFSDYYMYWVRQAPGKGLEWVAIISDGGYYTYYSDIIKGRFTISRDNAKNSLYLQMNSLKAEDTAVYYCARGFPLLRHGAMDYWGQGTLVTVSSGGGGSGGGGSGGGGSDIQMTQSPSSLSASVGDRVTITCKASQNVDTNVAWYQQKPGQAPKSLIYSASYVYWDVPSRFSGSASGTDFTLTISSVQSEDFATYYCQQYDQQLITFGGGTKLEIKSGGGGSEVQLVESGGGLVQPGGSLKLSCAASGFTFNKYAMNWVRQAPGKGLEWVARIRSKYNNYATYYADSVKDRFTISRDDSKNTAYLQMNNLKTEDTAVYYCVRHGNFGNSYISYWAYWGQGTLVTVSSGGGGSGGGGSGGGGSQTVVTQEPSLTVSPGGTVTLTCGSSTGAVTSGNYPNWVQQKPGQAPRGLIGGTKFLAPGTPARFSGSLLGGKAALTLSGVQPEDEAEYYCVLWYSNRWVFGGGTKLTVLGGGGDKTHTCPPCPAPELLGGPSVFLFPPKPKDTLMISRTPEVTCVVVDVSHEDPEVKFNWYVDGVEVHNAKTKPCEEQYGSTYRCVSVLTVLHQDWLNGKEYKCKVSNKALPAPIEKTISKAKGQPREPQVYTLPPSREEMTKNQVSLTCLVKGFYPSDIAVEWESNGQPENNYKTTPPVLDSDGSFFLYSKLTVDKSRWQQGNVFSCSVMHEALHNHYTQKSLSLSPGGGGSGGGGSGGGGSGGGGSGGGGSGGGGSDKTHTCPPCPAPELLGGPSVFLFPPKPKDTLMISRTPEVTCVVVDVSHEDPEVKFNWYVDGVEVHNAKTKPCEEQYGSTYRCVSVLTVLHQDWLNGKEYKCKVSNKALPAPIEKTISKAKGQPREPQVYTLPPSREEMTKNQVSLTCLVKGFYPSDIAVEWESNGQPENNYKTTPPVLDSDGSFFLYSKLTVDKSRWQQGNVFSCSVMHEALHNHYTQKSLSLSPGK

SEQ ID NO: 369 - protein, 498 aa, Artificial Sequence
  Synthetic peptide
QVQLVESGGGLVKPGESLRLSCAASGFTFSDYYMYWVRQAPGKGLEWVAIISDGGYYTYYSDIIKGRFTISRDNAKNSLYLQMNSLKAEDTAVYYCARGFPLLRHGAMDYWGQGTLVTVSSGGGGSGGGGSGGGGSDIQMTQSPSSLSASVGDRVTITCKASQNVDTNVAWYQQKPGQAPKSLIYSASYVYWDVPSRFSGSASGTDFTLTISSVQSEDFATYYCQQYDQQLITFGGGTKLEIKSGGGGSEVQLVESGGGLVQPGGSLKLSCAASGFTFNKYAMNWVRQAPGKGLEWVARIRSKYNNYATYYADSVKDRFTISRDDSKNTAYLQMNNLKTEDTAVYYCVRHGNFGNSYISYWAYCGQGTLVTVSSGGGGSGGGGSGGGGSQTVVTQEPSLTVSPGGTVTLTCGSSTGAVTSGNYPNWVQQKPGQCPRGLIGGTKFLAPGTPARFSGSLLGGKAALTLSGVQPEDEAEYYCVLWYSNRWVFGGGTKLTVL

SEQ ID NO: 370 - protein, 986 aa, Artificial Sequence
  Synthetic peptide
QVQLVESGGGLVKPGESLRLSCAASGFTFSDYYMYWVRQAPGKGLEWVAIISDGGYYTYYSDIIKGRFTISRDNAKNSLYLQMNSLKAEDTAVYYCARGFPLLRHGAMDYWGQGTLVTVSSGGGGSGGGGSGGGGSDIQMTQSPSSLSASVGDRVTITCKASQNVDTNVAWYQQKPGQAPKSLIYSASYVYWDVPSRFSGSASGTDFTLTISSVQSEDFATYYCQQYDQQLITFGGGTKLEIKSGGGGSEVQLVESGGGLVQPGGSLKLSCAASGFTFNKYAMNWVRQAPGKGLEWVARIRSKYNNYATYYADSVKDRFTISRDDSKNTAYLQMNNLKTEDTAVYYCVRHGNFGNSYISYWAYCGQGTLVTVSSGGGGSGGGGSGGGGSQTVVTQEPSLTVSPGGTVTLTCGSSTGAVTSGNYPNWVQQKPGQCPRGLIGGTKFLAPGTPARFSGSLLGGKAALTLSGVQPEDEAEYYCVLWYSNRWVFGGGTKLTVLGGGGDKTHTCPPCPAPELLGGPSVFLFPPKPKDTLMISRTPEVTCVVVDVSHEDPEVKFNWYVDGVEVHNAKTKPCEEQYGSTYRCVSVLTVLHQDWLNGKEYKCKVSNKALPAPIEKTISKAKGQPREPQVYTLPPSREEMTKNQVSLTCLVKGFYPSDIAVEWESNGQPENNYKTTPPVLDSDGSFFLYSKLTVDKSRWQQGNVFSCSVMHEALHNHYTQKSLSLSPGKGGGGSGGGGSGGGGSGGGGSGGGGSGGGGSDKTHTCPPCPAPELLGGPSVFLFPPKPKDTLMISRTPEVTCVVVDVSHEDPEVKFNWYVDGVEVHNAKTKPCEEQYGSTYRCVSVLTVLHQDWLNGKEYKCKVSNKALPAPIEKTISKAKGQPREPQVYTLPPSREEMTKNQVSLTCLVKGFYPSDIAVEWESNGQPENNYKTTPPVLDSDGSFFLYSKLTVDKSRWQQGNVFSCSVMHEALHNHYTQKSLSLSPGK

SEQ ID NO: 371 - protein, 984 aa, Artificial Sequence
  Synthetic peptide
QVQLVESGGGLVKPGESLRLSCAASGFTFSDYYMYWVRQAPGKGLEWVAIISDGGYYTYYSDIIKGRFTISRDNAKNSLYLQMNSLKAEDTAVYYCARGFPLLRHGAMDYWGQGTLVTVSSGGGGSGGGGSGGGGSDIQMTQSPSSLSASVGDRVTITCKASQNVDTNVAWYQQKPGQAPKSLIYSASYVYWDVPSRFSGSASGTDFTLTISSVQSEDFATYYCQQYDQQLITFGGGTKLEIKSGGGGSEVQLVESGGGLVQPGGSLKLSCAASGFTFNKYAMNWVRQAPGKGLEWVARIRSKYNNYATYYADSVKDRFTISRDDSKNTAYLQMNNLKTEDTAVYYCVRHGNFGNSYISYWAYCGQGTLVTVSSGGGGSGGGGSGGGGSQTVVTQEPSLTVSPGGTVTLTCGSSTGAVTSGNYPNWVQQKPGQCPRGLIGGTKFLAPGTPARFSGSLLGGKAALTLSGVQPEDEAEYYCVLWYSNRWVFGGGTKLTVLGGGGDKTHTCPPCPAPELLGGPSVFLFPPKPKDTLMISRTPEVTCVVVDVSHEDPEVKFNWYVDGVEVHNAKTKPCEEQYGSTYRCVSVLTVLHQDWLNGKEYKCKVSNKALPAPIEKTISKAKGQPREPQVYTLPPSREEMTKNQVSLTCLVKGFYPSDIAVEWESNGQPENNYKTTPPVLDSDGSFFLYSKLTVDKSRWQQGNVFSCSVMHEALHNHYTQKSLSLSPGGGGSGGGGSGGGGSGGGGSGGGGSGGGGSDKTHTCPPCPAPELLGGPSVFLFPPKPKDTLMISRTPEVTCVVVDVSHEDPEVKFNWYVDGVEVHNAKTKPCEEQYGSTYRCVSVLTVLHQDWLNGKEYKCKVSNKALPAPIEKTISKAKGQPREPQVYTLPPSREEMTKNQVSLTCLVKGFYPSDIAVEWESNGQPENNYKTTPPVLDSDGSFFLYSKLTVDKSRWQQGNVFSCSVMHEALHNHYTQKSLSLSPGK

SEQ ID NO: 372 - protein, 5 aa, Artificial Sequence
  Synthetic peptide
DYYMY

SEQ ID NO: 373 - protein, 17 aa, Artificial Sequence
  Synthetic peptide
IISDGGYYTYYSDIIKG

SEQ ID NO: 374 - protein, 12 aa, Artificial Sequence
  Synthetic peptide
GFPLLRHGAMDY

SEQ ID NO: 375 - protein, 11 aa, Artificial Sequence
  Synthetic peptide
KASQNVDTNVA

SEQ ID NO: 376 - protein, 7 aa, Artificial Sequence
  Synthetic peptide
SASYVYW

SEQ ID NO: 377 - protein, 9 aa, Artificial Sequence
  Synthetic peptide
QQYDQQLIT

SEQ ID NO: 378 - protein, 121 aa, Artificial Sequence; identical to SEQ ID NO: 162
  Synthetic peptide

SEQ ID NO: 379 - protein, 107 aa, Artificial Sequence
  Synthetic peptide
DIQMTQSPSSLSASVGDRVTITCKASQNVDTNVAWYQQKPGQAPKSLIYSASYVYWDVPSRFSGSASGTDFTLTISSVQSEDFATYYCQQYDQQLITFGCGTKLEIK

SEQ ID NO: 380 - protein, 243 aa, Artificial Sequence
  Synthetic peptide
QVQLVESGGGLVKPGESLRLSCAASGFTFSDYYMYWVRQAPGKCLEWVAIISDGGYYTYYSDIIKGRFTISRDNAKNSLYLQMNSLKAEDTAVYYCARGFPLLRHGAMDYWGQGTLVTVSSGGGGSGGGGSGGGGSDIQMTQSPSSLSASVGDRVTITCKASQNVDTNVAWYQQKPGQAPKSLIYSASYVYWDVPSRFSGSASGTDFTLTISSVQSEDFATYYCQQYDQQLITFGCGTKLEIK

SEQ ID NO: 381 - protein, 498 aa, Artificial Sequence
  Synthetic peptide
QVQLVESGGGLVKPGESLRLSCAASGFTFSDYYMYWVRQAPGKCLEWVAIISDGGYYTYYSDIIKGRFTISRDNAKNSLYLQMNSLKAEDTAVYYCARGFPLLRHGAMDYWGQGTLVTVSSGGGGSGGGGSGGGGSDIQMTQSPSSLSASVGDRVTITCKASQNVDTNVAWYQQKPGQAPKSLIYSASYVYWDVPSRFSGSASGTDFTLTISSVQSEDFATYYCQQYDQQLITFGCGTKLEIKSGGGGSEVQLVESGGGLVQPGGSLKLSCAASGFTFNKYAMNWVRQAPGKGLEWVARIRSKYNNYATYYADSVKDRFTISRDDSKNTAYLQMNNLKTEDTAVYYCVRHGNFGNSYISYWAYWGQGTLVTVSSGGGGSGGGGSGGGGSQTVVTQEPSLTVSPGGTVTLTCGSSTGAVTSGNYPNWVQQKPGQAPRGLIGGTKFLAPGTPARFSGSLLGGKAALTLSGVQPEDEAEYYCVLWYSNRWVFGGGTKLTVL

SEQ ID NO: 382 - protein, 986 aa, Artificial Sequence
  Synthetic peptide
QVQLVESGGGLVKPGESLRLSCAASGFTFSDYYMYWVRQAPGKCLEWVAIISDGGYYTYYSDIIKGRFTISRDNAKNSLYLQMNSLKAEDTAVYYCARGFPLLRHGAMDYWGQGTLVTVSSGGGGSGGGGSGGGGSDIQMTQSPSSLSASVGDRVTITCKASQNVDTNVAWYQQKPGQAPKSLIYSASYVYWDVPSRFSGSASGTDFTLTISSVQSEDFATYYCQQYDQQLITFGCGTKLEIKSGGGGSEVQLVESGGGLVQPGGSLKLSCAASGFTFNKYAMNWVRQAPGKGLEWVARIRSKYNNYATYYADSVKDRFTISRDDSKNTAYLQMNNLKTEDTAVYYCVRHGNFGNSYISYWAYWGQGTLVTVSSGGGGSGGGGSGGGGSQTVVTQEPSLTVSPGGTVTLTCGSSTGAVTSGNYPNWVQQKPGQAPRGLIGGTKFLAPGTPARFSGSLLGGKAALTLSGVQPEDEAEYYCVLWYSNRWVFGGGTKLTVLGGGGDKTHTCPPCPAPELLGGPSVFLFPPKPKDTLMISRTPEVTCVVVDVSHEDPEVKFNWYVDGVEVHNAKTKPCEEQYGSTYRCVSVLTVLHQDWLNGKEYKCKVSNKALPAPIEKTISKAKGQPREPQVYTLPPSREEMTKNQVSLTCLVKGFYPSDIAVEWESNGQPENNYKTTPPVLDSDGSFFLYSKLTVDKSRWQQGNVFSCSVMHEALHNHYTQKSLSLSPGKGGGGSGGGGSGGGGSGGGGSGGGGSGGGGSDKTHTCPPCPAPELLGGPSVFLFPPKPKDTLMISRTPEVTCVVVDVSHEDPEVKFNWYVDGVEVHNAKTKPCEEQYGSTYRCVSVLTVLHQDWLNGKEYKCKVSNKALPAPIEKTISKAKGQPREPQVYTLPPSREEMTKNQVSLTCLVKGFYPSDIAVEWESNGQPENNYKTTPPVLDSDGSFFLYSKLTVDKSRWQQGNVFSCSVMHEALHNHYTQKSLSLSPGK

SEQ ID NO: 383 - protein, 984 aa, Artificial Sequence
  Synthetic peptide
QVQLVESGGGLVKPGESLRLSCAASGFTFSDYYMYWVRQAPGKCLEWVAIISDGGYYTYYSDIIKGRFTISRDNAKNSLYLQMNSLKAEDTAVYYCARGFPLLRHGAMDYWGQGTLVTVSSGGGGSGGGGSGGGGSDIQMTQSPSSLSASVGDRVTITCKASQNVDTNVAWYQQKPGQAPKSLIYSASYVYWDVPSRFSGSASGTDFTLTISSVQSEDFATYYCQQYDQQLITFGCGTKLEIKSGGGGSEVQLVESGGGLVQPGGSLKLSCAASGFTFNKYAMNWVRQAPGKGLEWVARIRSKYNNYATYYADSVKDRFTISRDDSKNTAYLQMNNLKTEDTAVYYCVRHGNFGNSYISYWAYWGQGTLVTVSSGGGGSGGGGSGGGGSQTVVTQEPSLTVSPGGTVTLTCGSSTGAVTSGNYPNWVQQKPGQAPRGLIGGTKFLAPGTPARFSGSLLGGKAALTLSGVQPEDEAEYYCVLWYSNRWVFGGGTKLTVLGGGGDKTHTCPPCPAPELLGGPSVFLFPPKPKDTLMISRTPEVTCVVVDVSHEDPEVKFNWYVDGVEVHNAKTKPCEEQYGSTYRCVSVLTVLHQDWLNGKEYKCKVSNKALPAPIEKTISKAKGQPREPQVYTLPPSREEMTKNQVSLTCLVKGFYPSDIAVEWESNGQPENNYKTTPPVLDSDGSFFLYSKLTVDKSRWQQGNVFSCSVMHEALHNHYTQKSLSLSPGGGGSGGGGSGGGGSGGGGSGGGGSGGGGSDKTHTCPPCPAPELLGGPSVFLFPPKPKDTLMISRTPEVTCVVVDVSHEDPEVKFNWYVDGVEVHNAKTKPCEEQYGSTYRCVSVLTVLHQDWLNGKEYKCKVSNKALPAPIEKTISKAKGQPREPQVYTLPPSREEMTKNQVSLTCLVKGFYPSDIAVEWESNGQPENNYKTTPPVLDSDGSFFLYSKLTVDKSRWQQGNVFSCSVMHEALHNHYTQKSLSLSPGK

SEQ ID NO: 384 - protein, 498 aa, Artificial Sequence
  Synthetic peptide
QVQLVESGGGLVKPGESLRLSCAASGFTFSDYYMYWVRQAPGKCLEWVAIISDGGYYTYYSDIIKGRFTISRDNAKNSLYLQMNSLKAEDTAVYYCARGFPLLRHGAMDYWGQGTLVTVSSGGGGSGGGGSGGGGSDIQMTQSPSSLSASVGDRVTITCKASQNVDTNVAWYQQKPGQAPKSLIYSASYVYWDVPSRFSGSASGTDFTLTISSVQSEDFATYYCQQYDQQLITFGCGTKLEIKSGGGGSEVQLVESGGGLVQPGGSLKLSCAASGFTFNKYAMNWVRQAPGKGLEWVARIRSKYNNYATYYADSVKDRFTISRDDSKNTAYLQMNNLKTEDTAVYYCVRHGNFGNSYISYWAYCGQGTLVTVSSGGGGSGGGGSGGGGSQTVVTQEPSLTVSPGGTVTLTCGSSTGAVTSGNYPNWVQQKPGQCPRGLIGGTKFLAPGTPARFSGSLLGGKAALTLSGVQPEDEAEYYCVLWYSNRWVFGGGTKLTVL

SEQ ID NO: 385 - protein, 986 aa, Artificial Sequence
  Synthetic peptide
QVQLVESGGGLVKPGESLRLSCAASGFTFSDYYMYWVRQAPGKCLEWVAIISDGGYYTYYSDIIKGRFTISRDNAKNSLYLQMNSLKAEDTAVYYCARGFPLLRHGAMDYWGQGTLVTVSSGGGGSGGGGSGGGGSDIQMTQSPSSLSASVGDRVTITCKASQNVDTNVAWYQQKPGQAPKSLIYSASYVYWDVPSRFSGSASGTDFTLTISSVQSEDFATYYCQQYDQQLITFGCGTKLEIKSGGGGSEVQLVESGGGLVQPGGSLKLSCAASGFTFNKYAMNWVRQAPGKGLEWVARIRSKYNNYATYYADSVKDRFTISRDDSKNTAYLQMNNLKTEDTAVYYCVRHGNFGNSYISYWAYCGQGTLVTVSSGGGGSGGGGSGGGGSQTVVTQEPSLTVSPGGTVTLTCGSSTGAVTSGNYPNWVQQKPGQCPRGLIGGTKFLAPGTPARFSGSLLGGKAALTLSGVQPEDEAEYYCVLWYSNRWVFGGGTKLTVLGGGGDKTHTCPPCPAPELLGGPSVFLFPPKPKDTLMISRTPEVTCVVVDVSHEDPEVKFNWYVDGVEVHNAKTKPCEEQYGSTYRCVSVLTVLHQDWLNGKEYKCKVSNKALPAPIEKTISKAKGQPREPQVYTLPPSREEMTKNQVSLTCLVKGFYPSDIAVEWESNGQPENNYKTTPPVLDSDGSFFLYSKLTVDKSRWQQGNVFSCSVMHEALHNHYTQKSLSLSPGKGGGGSGGGGSGGGGSGGGGSGGGGSGGGGSDKTHTCPPCPAPELLGGPSVFLFPPKPKDTLMISRTPEVTCVVVDVSHEDPEVKFNWYVDGVEVHNAKTKPCEEQYGSTYRCVSVLTVLHQDWLNGKEYKCKVSNKALPAPIEKTISKAKGQPREPQVYTLPPSREEMTKNQVSLTCLVKGFYPSDIAVEWESNGQPENNYKTTPPVLDSDGSFFLYSKLTVDKSRWQQGNVFSCSVMHEALHNHYTQKSLSLSPGK

SEQ ID NO: 386 - protein, 984 aa, Artificial Sequence
  Synthetic peptide
QVQLVESGGGLVKPGESLRLSCAASGFTFSDYYMYWVRQAPGKCLEWVAIISDGGYYTYYSDIIKGRFTISRDNAKNSLYLQMNSLKAEDTAVYYCARGFPLLRHGAMDYWGQGTLVTVSSGGGGSGGGGSGGGGSDIQMTQSPSSLSASVGDRVTITCKASQNVDTNVAWYQQKPGQAPKSLIYSASYVYWDVPSRFSGSASGTDFTLTISSVQSEDFATYYCQQYDQQLITFGCGTKLEIKSGGGGSEVQLVESGGGLVQPGGSLKLSCAASGFTFNKYAMNWVRQAPGKGLEWVARIRSKYNNYATYYADSVKDRFTISRDDSKNTAYLQMNNLKTEDTAVYYCVRHGNFGNSYISYWAYCGQGTLVTVSSGGGGSGGGGSGGGGSQTVVTQEPSLTVSPGGTVTLTCGSSTGAVTSGNYPNWVQQKPGQCPRGLIGGTKFLAPGTPARFSGSLLGGKAALTLSGVQPEDEAEYYCVLWYSNRWVFGGGTKLTVLGGGGDKTHTCPPCPAPELLGGPSVFLFPPKPKDTLMISRTPEVTCVVVDVSHEDPEVKFNWYVDGVEVHNAKTKPCEEQYGSTYRCVSVLTVLHQDWLNGKEYKCKVSNKALPAPIEKTISKAKGQPREPQVYTLPPSREEMTKNQVSLTCLVKGFYPSDIAVEWESNGQPENNYKTTPPVLDSDGSFFLYSKLTVDKSRWQQGNVFSCSVMHEALHNHYTQKSLSLSPGGGGSGGGGSGGGGSGGGGSGGGGSGGGGSDKTHTCPPCPAPELLGGPSVFLFPPKPKDTLMISRTPEVTCVVVDVSHEDPEVKFNWYVDGVEVHNAKTKPCEEQYGSTYRCVSVLTVLHQDWLNGKEYKCKVSNKALPAPIEKTISKAKGQPREPQVYTLPPSREEMTKNQVSLTCLVKGFYPSDIAVEWESNGQPENNYKTTPPVLDSDGSFFLYSKLTVDKSRWQQGNVFSCSVMHEALHNHYTQKSLSLSPGK

SEQ ID NO: 387 - protein, 5 aa, Artificial Sequence
  Synthetic peptide
DYYMY

SEQ ID NO: 388 - protein, 17 aa, Artificial Sequence
  Synthetic peptide
IISDAGYYTYYSDIIKG

SEQ ID NO: 389 - protein, 12 aa, Artificial Sequence
  Synthetic peptide
GFPLLRHGAMDY

SEQ ID NO: 390 - protein, 11 aa, Artificial Sequence
  Synthetic peptide
KASQNVDANVA

SEQ ID NO: 391 - protein, 7 aa, Artificial Sequence
  Synthetic peptide
SASYRYS

SEQ ID NO: 392 - protein, 9 aa, Artificial Sequence
  Synthetic peptide
QQYDQQLIT

SEQ ID NO: 393 - protein, 121 aa, Artificial Sequence
  Synthetic peptide
QVQLVESGGGLVKPGESLRLSCAASGFTFSDYYMYWVRQAPGKGLEWVAIISDAGYYTYYSDIIKGRFTISRDNAKNSLYLQMNSLKAEDTAVYYCARGFPLLRHGAMDYWGQGTLVTVSS

SEQ ID NO: 394 - protein, 107 aa, Artificial Sequence
  Synthetic peptide
DIQMTQSPSSLSASVGDRVTITCKASQNVDANVAWYQQKPGQAPKSLIYSASYRYSDVPSRFSGSASGTDFTLTISSVQSEDFATYYCQQYDQQLITFGGGTKLEIK

SEQ ID NO: 395 - protein, 243 aa, Artificial Sequence
  Synthetic peptide
QVQLVESGGGLVKPGESLRLSCAASGFTFSDYYMYWVRQAPGKGLEWVAIISDAGYYTYYSDIIKGRFTISRDNAKNSLYLQMNSLKAEDTAVYYCARGFPLLRHGAMDYWGQGTLVTVSSGGGGSGGGGSGGGGSDIQMTQSPSSLSASVGDRVTITCKASQNVDANVAWYQQKPGQAPKSLIYSASYRYSDVPSRFSGSASGTDFTLTISSVQSEDFATYYCQQYDQQLITFGGGTKLEIK

SEQ ID NO: 396 - protein, 498 aa, Artificial Sequence
  Synthetic peptide
QVQLVESGGGLVKPGESLRLSCAASGFTFSDYYMYWVRQAPGKGLEWVAIISDAGYYTYYSDIIKGRFTISRDNAKNSLYLQMNSLKAEDTAVYYCARGFPLLRHGAMDYWGQGTLVTVSSGGGGSGGGGSGGGGSDIQMTQSPSSLSASVGDRVTITCKASQNVDANVAWYQQKPGQAPKSLIYSASYRYSDVPSRFSGSASGTDFTLTISSVQSEDFATYYCQQYDQQLITFGGGTKLEIKSGGGGSEVQLVESGGGLVQPGGSLKLSCAASGFTFNKYAMNWVRQAPGKGLEWVARIRSKYNNYATYYADSVKDRFTISRDDSKNTAYLQMNNLKTEDTAVYYCVRHGNFGNSYISYWAYWGQGTLVTVSSGGGGSGGGGSGGGGSQTVVTQEPSLTVSPGGTVTLTCGSSTGAVTSGNYPNWVQQKPGQAPRGLIGGTKFLAPGTPARFSGSLLGGKAALTLSGVQPEDEAEYYCVLWYSNRWVFGGGTKLTVL

SEQ ID NO: 397 - protein, 986 aa, Artificial Sequence
  Synthetic peptide
QVQLVESGGGLVKPGESLRLSCAASGFTFSDYYMYWVRQAPGKGLEWVAIISDAGYYTYYSDIIKGRFTISRDNAKNSLYLQMNSLKAEDTAVYYCARGFPLLRHGAMDYWGQGTLVTVSSGGGGSGGGGSGGGGSDIQMTQSPSSLSASVGDRVTITCKASQNVDANVAWYQQKPGQAPKSLIYSASYRYSDVPSRFSGSASGTDFTLTISSVQSEDFATYYCQQYDQQLITFGGGTKLEIKSGGGGSEVQLVESGGGLVQPGGSLKLSCAASGFTFNKYAMNWVRQAPGKGLEWVARIRSKYNNYATYYADSVKDRFTISRDDSKNTAYLQMNNLKTEDTAVYYCVRHGNFGNSYISYWAYWGQGTLVTVSSGGGGSGGGGSGGGGSQTVVTQEPSLTVSPGGTVTLTCGSSTGAVTSGNYPNWVQQKPGQAPRGLIGGTKFLAPGTPARFSGSLLGGKAALTLSGVQPEDEAEYYCVLWYSNRWVFGGGTKLTVLGGGGDKTHTCPPCPAPELLGGPSVFLFPPKPKDTLMISRTPEVTCVVVDVSHEDPEVKFNWYVDGVEVHNAKTKPCEEQYGSTYRCVSVLTVLHQDWLNGKEYKCKVSNKALPAPIEKTISKAKGQPREPQVYTLPPSREEMTKNQVSLTCLVKGFYPSDIAVEWESNGQPENNYKTTPPVLDSDGSFFLYSKLTVDKSRWQQGNVFSCSVMHEALHNHYTQKSLSLSPGKGGGGSGGGGSGGGGSGGGGSGGGGSGGGGSDKTHTCPPCPAPELLGGPSVFLFPPKPKDTLMISRTPEVTCVVVDVSHEDPEVKFNWYVDGVEVHNAKTKPCEEQYGSTYRCVSVLTVLHQDWLNGKEYKCKVSNKALPAPIEKTISKAKGQPREPQVYTLPPSREEMTKNQVSLTCLVKGFYPSDIAVEWESNGQPENNYKTTPPVLDSDGSFFLYSKLTVDKSRWQQGNVFSCSVMHEALHNHYTQKSLSLSPGK

SEQ ID NO: 398 - protein, 984 aa, Artificial Sequence
  Synthetic peptide
QVQLVESGGGLVKPGESLRLSCAASGFTFSDYYMYWVRQAPGKGLEWVAIISDAGYYTYYSDIIKGRFTISRDNAKNSLYLQMNSLKAEDTAVYYCARGFPLLRHGAMDYWGQGTLVTVSSGGGGSGGGGSGGGGSDIQMTQSPSSLSASVGDRVTITCKASQNVDANVAWYQQKPGQAPKSLIYSASYRYSDVPSRFSGSASGTDFTLTISSVQSEDFATYYCQQYDQQLITFGGGTKLEIKSGGGGSEVQLVESGGGLVQPGGSLKLSCAASGFTFNKYAMNWVRQAPGKGLEWVARIRSKYNNYATYYADSVKDRFTISRDDSKNTAYLQMNNLKTEDTAVYYCVRHGNFGNSYISYWAYWGQGTLVTVSSGGGGSGGGGSGGGGSQTVVTQEPSLTVSPGGTVTLTCGSSTGAVTSGNYPNWVQQKPGQAPRGLIGGTKFLAPGTPARFSGSLLGGKAALTLSGVQPEDEAEYYCVLWYSNRWVFGGGTKLTVLGGGGDKTHTCPPCPAPELLGGPSVFLFPPKPKDTLMISRTPEVTCVVVDVSHEDPEVKFNWYVDGVEVHNAKTKPCEEQYGSTYRCVSVLTVLHQDWLNGKEYKCKVSNKALPAPIEKTISKAKGQPREPQVYTLPPSREEMTKNQVSLTCLVKGFYPSDIAVEWESNGQPENNYKTTPPVLDSDGSFFLYSKLTVDKSRWQQGNVFSCSVMHEALHNHYTQKSLSLSPGGGGSGGGGSGGGGSGGGGSGGGGSGGGGSDKTHTCPPCPAPELLGGPSVFLFPPKPKDTLMISRTPEVTCVVVDVSHEDPEVKFNWYVDGVEVHNAKTKPCEEQYGSTYRCVSVLTVLHQDWLNGKEYKCKVSNKALPAPIEKTISKAKGQPREPQVYTLPPSREEMTKNQVSLTCLVKGFYPSDIAVEWESNGQPENNYKTTPPVLDSDGSFFLYSKLTVDKSRWQQGNVFSCSVMHEALHNHYTQKSLSLSPGK

SEQ ID NO: 399 - protein, 498 aa, Artificial Sequence
  Synthetic peptide
QVQLVESGGGLVKPGESLRLSCAASGFTFSDYYMYWVRQAPGKGLEWVAIISDAGYYTYYSDIIKGRFTISRDNAKNSLYLQMNSLKAEDTAVYYCARGFPLLRHGAMDYWGQGTLVTVSSGGGGSGGGGSGGGGSDIQMTQSPSSLSASVGDRVTITCKASQNVDANVAWYQQKPGQAPKSLIYSASYRYSDVPSRFSGSASGTDFTLTISSVQSEDFATYYCQQYDQQLITFGGGTKLEIKSGGGGSEVQLVESGGGLVQPGGSLKLSCAASGFTFNKYAMNWVRQAPGKGLEWVARIRSKYNNYATYYADSVKDRFTISRDDSKNTAYLQMNNLKTEDTAVYYCVRHGNFGNSYISYWAYCGQGTLVTVSSGGGGSGGGGSGGGGSQTVVTQEPSLTVSPGGTVTLTCGSSTGAVTSGNYPNWVQQKPGQCPRGLIGGTKFLAPGTPARFSGSLLGGKAALTLSGVQPEDEAEYYCVLWYSNRWVFGGGTKLTVL

SEQ ID NO: 400 - protein, 986 aa, Artificial Sequence
  Synthetic peptide
QVQLVESGGGLVKPGESLRLSCAASGFTFSDYYMYWVRQAPGKGLEWVAIISDAGYYTYYSDIIKGRFTISRDNAKNSLYLQMNSLKAEDTAVYYCARGFPLLRHGAMDYWGQGTLVTVSSGGGGSGGGGSGGGGSDIQMTQSPSSLSASVGDRVTITCKASQNVDANVAWYQQKPGQAPKSLIYSASYRYSDVPSRFSGSASGTDFTLTISSVQSEDFATYYCQQYDQQLITFGGGTKLEIKSGGGGSEVQLVESGGGLVQPGGSLKLSCAASGFTFNKYAMNWVRQAPGKGLEWVARIRSKYNNYATYYADSVKDRFTISRDDSKNTAYLQMNNLKTEDTAVYYCVRHGNFGNSYISYWAYCGQGTLVTVSSGGGGSGGGGSGGGGSQTVVTQEPSLTVSPGGTVTLTCGSSTGAVTSGNYPNWVQQKPGQCPRGLIGGTKFLAPGTPARFSGSLLGGKAALTLSGVQPEDEAEYYCVLWYSNRWVFGGGTKLTVLGGGGDKTHTCPPCPAPELLGGPSVFLFPPKPKDTLMISRTPEVTCVVVDVSHEDPEVKFNWYVDGVEVHNAKTKPCEEQYGSTYRCVSVLTVLHQDWLNGKEYKCKVSNKALPAPIEKTISKAKGQPREPQVYTLPPSREEMTKNQVSLTCLVKGFYPSDIAVEWESNGQPENNYKTTPPVLDSDGSFFLYSKLTVDKSRWQQGNVFSCSVMHEALHNHYTQKSLSLSPGKGGGGSGGGGSGGGGSGGGGSGGGGSGGGGSDKTHTCPPCPAPELLGGPSVFLFPPKPKDTLMISRTPEVTCVVVDVSHEDPEVKFNWYVDGVEVHNAKTKPCEEQYGSTYRCVSVLTVLHQDWLNGKEYKCKVSNKALPAPIEKTISKAKGQPREPQVYTLPPSREEMTKNQVSLTCLVKGFYPSDIAVEWESNGQPENNYKTTPPVLDSDGSFFLYSKLTVDKSRWQQGNVFSCSVMHEALHNHYTQKSLSLSPGK

SEQ ID NO: 401 - protein, 984 aa, Artificial Sequence
  Synthetic peptide
QVQLVESGGGLVKPGESLRLSCAASGFTFSDYYMYWVRQAPGKGLEWVAIISDAGYYTYYSDIIKGRFTISRDNAKNSLYLQMNSLKAEDTAVYYCARGFPLLRHGAMDYWGQGTLVTVSSGGGGSGGGGSGGGGSDIQMTQSPSSLSASVGDRVTITCKASQNVDANVAWYQQKPGQAPKSLIYSASYRYSDVPSRFSGSASGTDFTLTISSVQSEDFATYYCQQYDQQLITFGGGTKLEIKSGGGGSEVQLVESGGGLVQPGGSLKLSCAASGFTFNKYAMNWVRQAPGKGLEWVARIRSKYNNYATYYADSVKDRFTISRDDSKNTAYLQMNNLKTEDTAVYYCVRHGNFGNSYISYWAYCGQGTLVTVSSGGGGSGGGGSGGGGSQTVVTQEPSLTVSPGGTVTLTCGSSTGAVTSGNYPNWVQQKPGQCPRGLIGGTKFLAPGTPARFSGSLLGGKAALTLSGVQPEDEAEYYCVLWYSNRWVFGGGTKLTVLGGGGDKTHTCPPCPAPELLGGPSVFLFPPKPKDTLMISRTPEVTCVVVDVSHEDPEVKFNWYVDGVEVHNAKTKPCEEQYGSTYRCVSVLTVLHQDWLNGKEYKCKVSNKALPAPIEKTISKAKGQPREPQVYTLPPSREEMTKNQVSLTCLVKGFYPSDIAVEWESNGQPENNYKTTPPVLDSDGSFFLYSKLTVDKSRWQQGNVFSCSVMHEALHNHYTQKSLSLSPGGGGSGGGGSGGGGSGGGGSGGGGSGGGGSDKTHTCPPCPAPELLGGPSVFLFPPKPKDTLMISRTPEVTCVVVDVSHEDPEVKFNWYVDGVEVHNAKTKPCEEQYGSTYRCVSVLTVLHQDWLNGKEYKCKVSNKALPAPIEKTISKAKGQPREPQVYTLPPSREEMTKNQVSLTCLVKGFYPSDIAVEWESNGQPENNYKTTPPVLDSDGSFFLYSKLTVDKSRWQQGNVFSCSVMHEALHNHYTQKSLSLSPGK

SEQ ID NO: 402 - protein, 5 aa, Artificial Sequence
  Synthetic peptide
DYYMY

SEQ ID NO: 403 - protein, 17 aa, Artificial Sequence
  Synthetic peptide
IISDAGYYTYYSDIIKG

SEQ ID NO: 404 - protein, 12 aa, Artificial Sequence
  Synthetic peptide
GFPLLRHGAMDY

SEQ ID NO: 405 - protein, 11 aa, Artificial Sequence
  Synthetic peptide
KASQNVDANVA

SEQ ID NO: 406 - protein, 7 aa, Artificial Sequence
  Synthetic peptide
SASYRYS

SEQ ID NO: 407 - protein, 9 aa, Artificial Sequence
  Synthetic peptide
QQYDQQLIT

SEQ ID NO: 408 - protein, 121 aa, Artificial Sequence; identical to SEQ ID NO: 318
  Synthetic peptide

SEQ ID NO: 409 - protein, 107 aa, Artificial Sequence
  Synthetic peptide
DIQMTQSPSSLSASVGDRVTITCKASQNVDANVAWYQQKPGQAPKSLIYSASYRYSDVPSRFSGSASGTDFTLTISSVQSEDFATYYCQQYDQQLITFGCGTKLEIK

SEQ ID NO: 410 - protein, 243 aa, Artificial Sequence
  Synthetic peptide
QVQLVESGGGLVKPGESLRLSCAASGFTFSDYYMYWVRQAPGKCLEWVAIISDAGYYTYYSDIIKGRFTISRDNAKNSLYLQMNSLKAEDTAVYYCARGFPLLRHGAMDYWGQGTLVTVSSGGGGSGGGGSGGGGSDIQMTQSPSSLSASVGDRVTITCKASQNVDANVAWYQQKPGQAPKSLIYSASYRYSDVPSRFSGSASGTDFTLTISSVQSEDFATYYCQQYDQQLITFGCGTKLEIK

SEQ ID NO: 411 - protein, 498 aa, Artificial Sequence
  Synthetic peptide
QVQLVESGGGLVKPGESLRLSCAASGFTFSDYYMYWVRQAPGKCLEWVAIISDAGYYTYYSDIIKGRFTISRDNAKNSLYLQMNSLKAEDTAVYYCARGFPLLRHGAMDYWGQGTLVTVSSGGGGSGGGGSGGGGSDIQMTQSPSSLSASVGDRVTITCKASQNVDANVAWYQQKPGQAPKSLIYSASYRYSDVPSRFSGSASGTDFTLTISSVQSEDFATYYCQQYDQQLITFGCGTKLEIKSGGGGSEVQLVESGGGLVQPGGSLKLSCAASGFTFNKYAMNWVRQAPGKGLEWVARIRSKYNNYATYYADSVKDRFTISRDDSKNTAYLQMNNLKTEDTAVYYCVRHGNFGNSYISYWAYWGQGTLVTVSSGGGGSGGGGSGGGGSQTVVTQEPSLTVSPGGTVTLTCGSSTGAVTSGNYPNWVQQKPGQAPRGLIGGTKFLAPGTPARFSGSLLGGKAALTLSGVQPEDEAEYYCVLWYSNRWVFGGGTKLTVL

SEQ ID NO: 412 - protein, 986 aa, Artificial Sequence
  Synthetic peptide
QVQLVESGGGLVKPGESLRLSCAASGFTFSDYYMYWVRQAPGKCLEWVAIISDAGYYTYYSDIIKGRFTISRDNAKNSLYLQMNSLKAEDTAVYYCARGFPLLRHGAMDYWGQGTLVTVSSGGGGSGGGGSGGGGSDIQMTQSPSSLSASVGDRVTITCKASQNVDANVAWYQQKPGQAPKSLIYSASYRYSDVPSRFSGSASGTDFTLTISSVQSEDFATYYCQQYDQQLITFGCGTKLEIKSGGGGSEVQLVESGGGLVQPGGSLKLSCAASGFTFNKYAMNWVRQAPGKGLEWVARIRSKYNNYATYYADSVKDRFTISRDDSKNTAYLQMNNLKTEDTAVYYCVRHGNFGNSYISYWAYWGQGTLVTVSSGGGGSGGGGSGGGGSQTVVTQEPSLTVSPGGTVTLTCGSSTGAVTSGNYPNWVQQKPGQAPRGLIGGTKFLAPGTPARFSGSLLGGKAALTLSGVQPEDEAEYYCVLWYSNRWVFGGGTKLTVLGGGGDKTHTCPPCPAPELLGGPSVFLFPPKPKDTLMISRTPEVTCVVVDVSHEDPEVKFNWYVDGVEVHNAKTKPCEEQYGSTYRCVSVLTVLHQDWLNGKEYKCKVSNKALPAPIEKTISKAKGQPREPQVYTLPPSREEMTKNQVSLTCLVKGFYPSDIAVEWESNGQPENNYKTTPPVLDSDGSFFLYSKLTVDKSRWQQGNVFSCSVMHEALHNHYTQKSLSLSPGKGGGGSGGGGSGGGGSGGGGSGGGGSGGGGSDKTHTCPPCPAPELLGGPSVFLFPPKPKDTLMISRTPEVTCVVVDVSHEDPEVKFNWYVDGVEVHNAKTKPCEEQYGSTYRCVSVLTVLHQDWLNGKEYKCKVSNKALPAPIEKTISKAKGQPREPQVYTLPPSREEMTKNQVSLTCLVKGFYPSDIAVEWESNGQPENNYKTTPPVLDSDGSFFLYSKLTVDKSRWQQGNVFSCSVMHEALHNHYTQKSLSLSPGK

SEQ ID NO: 413 - protein, 984 aa, Artificial Sequence
  Synthetic peptide
QVQLVESGGGLVKPGESLRLSCAASGFTFSDYYMYWVRQAPGKCLEWVAIISDAGYYTYYSDIIKGRFTISRDNAKNSLYLQMNSLKAEDTAVYYCARGFPLLRHGAMDYWGQGTLVTVSSGGGGSGGGGSGGGGSDIQMTQSPSSLSASVGDRVTITCKASQNVDANVAWYQQKPGQAPKSLIYSASYRYSDVPSRFSGSASGTDFTLTISSVQSEDFATYYCQQYDQQLITFGCGTKLEIKSGGGGSEVQLVESGGGLVQPGGSLKLSCAASGFTFNKYAMNWVRQAPGKGLEWVARIRSKYNNYATYYADSVKDRFTISRDDSKNTAYLQMNNLKTEDTAVYYCVRHGNFGNSYISYWAYWGQGTLVTVSSGGGGSGGGGSGGGGSQTVVTQEPSLTVSPGGTVTLTCGSSTGAVTSGNYPNWVQQKPGQAPRGLIGGTKFLAPGTPARFSGSLLGGKAALTLSGVQPEDEAEYYCVLWYSNRWVFGGGTKLTVLGGGGDKTHTCPPCPAPELLGGPSVFLFPPKPKDTLMISRTPEVTCVVVDVSHEDPEVKFNWYVDGVEVHNAKTKPCEEQYGSTYRCVSVLTVLHQDWLNGKEYKCKVSNKALPAPIEKTISKAKGQPREPQVYTLPPSREEMTKNQVSLTCLVKGFYPSDIAVEWESNGQPENNYKTTPPVLDSDGSFFLYSKLTVDKSRWQQGNVFSCSVMHEALHNHYTQKSLSLSPGGGGSGGGGSGGGGSGGGGSGGGGSGGGGSDKTHTCPPCPAPELLGGPSVFLFPPKPKDTLMISRTPEVTCVVVDVSHEDPEVKFNWYVDGVEVHNAKTKPCEEQYGSTYRCVSVLTVLHQDWLNGKEYKCKVSNKALPAPIEKTISKAKGQPREPQVYTLPPSREEMTKNQVSLTCLVKGFYPSDIAVEWESNGQPENNYKTTPPVLDSDGSFFLYSKLTVDKSRWQQGNVFSCSVMHEALHNHYTQKSLSLSPGK

SEQ ID NO: 414 - protein, 498 aa, Artificial Sequence
  Synthetic peptide
QVQLVESGGGLVKPGESLRLSCAASGFTFSDYYMYWVRQAPGKCLEWVAIISDAGYYTYYSDIIKGRFTISRDNAKNSLYLQMNSLKAEDTAVYYCARGFPLLRHGAMDYWGQGTLVTVSSGGGGSGGGGSGGGGSDIQMTQSPSSLSASVGDRVTITCKASQNVDANVAWYQQKPGQAPKSLIYSASYRYSDVPSRFSGSASGTDFTLTISSVQSEDFATYYCQQYDQQLITFGCGTKLEIKSGGGGSEVQLVESGGGLVQPGGSLKLSCAASGFTFNKYAMNWVRQAPGKGLEWVARIRSKYNNYATYYADSVKDRFTISRDDSKNTAYLQMNNLKTEDTAVYYCVRHGNFGNSYISYWAYCGQGTLVTVSSGGGGSGGGGSGGGGSQTVVTQEPSLTVSPGGTVTLTCGSSTGAVTSGNYPNWVQQKPGQCPRGLIGGTKFLAPGTPARFSGSLLGGKAALTLSGVQPEDEAEYYCVLWYSNRWVFGGGTKLTVL

SEQ ID NO: 415 - protein, 986 aa, Artificial Sequence
  Synthetic peptide
QVQLVESGGGLVKPGESLRLSCAASGFTFSDYYMYWVRQAPGKCLEWVAIISDAGYYTYYSDIIKGRFTISRDNAKNSLYLQMNSLKAEDTAVYYCARGFPLLRHGAMDYWGQGTLVTVSSGGGGSGGGGSGGGGSDIQMTQSPSSLSASVGDRVTITCKASQNVDANVAWYQQKPGQAPKSLIYSASYRYSDVPSRFSGSASGTDFTLTISSVQSEDFATYYCQQYDQQLITFGCGTKLEIKSGGGGSEVQLVESGGGLVQPGGSLKLSCAASGFTFNKYAMNWVRQAPGKGLEWVARIRSKYNNYATYYADSVKDRFTISRDDSKNTAYLQMNNLKTEDTAVYYCVRHGNFGNSYISYWAYCGQGTLVTVSSGGGGSGGGGSGGGGSQTVVTQEPSLTVSPGGTVTLTCGSSTGAVTSGNYPNWVQQKPGQCPRGLIGGTKFLAPGTPARFSGSLLGGKAALTLSGVQPEDEAEYYCVLWYSNRWVFGGGTKLTVLGGGGDKTHTCPPCPAPELLGGPSVFLFPPKPKDTLMISRTPEVTCVVVDVSHEDPEVKFNWYVDGVEVHNAKTKPCEEQYGSTYRCVSVLTVLHQDWLNGKEYKCKVSNKALPAPIEKTISKAKGQPREPQVYTLPPSREEMTKNQVSLTCLVKGFYPSDIAVEWESNGQPENNYKTTPPVLDSDGSFFLYSKLTVDKSRWQQGNVFSCSVMHEALHNHYTQKSLSLSPGKGGGGSGGGGSGGGGSGGGGSGGGGSGGGGSDKTHTCPPCPAPELLGGPSVFLFPPKPKDTLMISRTPEVTCVVVDVSHEDPEVKFNWYVDGVEVHNAKTKPCEEQYGSTYRCVSVLTVLHQDWLNGKEYKCKVSNKALPAPIEKTISKAKGQPREPQVYTLPPSREEMTKNQVSLTCLVKGFYPSDIAVEWESNGQPENNYKTTPPVLDSDGSFFLYSKLTVDKSRWQQGNVFSCSVMHEALHNHYTQKSLSLSPGK

SEQ ID NO: 416 - protein, 984 aa, Artificial Sequence
  Synthetic peptide
QVQLVESGGGLVKPGESLRLSCAASGFTFSDYYMYWVRQAPGKCLEWVAIISDAGYYTYYSDIIKGRFTISRDNAKNSLYLQMNSLKAEDTAVYYCARGFPLLRHGAMDYWGQGTLVTVSSGGGGSGGGGSGGGGSDIQMTQSPSSLSASVGDRVTITCKASQNVDANVAWYQQKPGQAPKSLIYSASYRYSDVPSRFSGSASGTDFTLTISSVQSEDFATYYCQQYDQQLITFGCGTKLEIKSGGGGSEVQLVESGGGLVQPGGSLKLSCAASGFTFNKYAMNWVRQAPGKGLEWVARIRSKYNNYATYYADSVKDRFTISRDDSKNTAYLQMNNLKTEDTAVYYCVRHGNFGNSYISYWAYCGQGTLVTVSSGGGGSGGGGSGGGGSQTVVTQEPSLTVSPGGTVTLTCGSSTGAVTSGNYPNWVQQKPGQCPRGLIGGTKFLAPGTPARFSGSLLGGKAALTLSGVQPEDEAEYYCVLWYSNRWVFGGGTKLTVLGGGGDKTHTCPPCPAPELLGGPSVFLFPPKPKDTLMISRTPEVTCVVVDVSHEDPEVKFNWYVDGVEVHNAKTKPCEEQYGSTYRCVSVLTVLHQDWLNGKEYKCKVSNKALPAPIEKTISKAKGQPREPQVYTLPPSREEMTKNQVSLTCLVKGFYPSDIAVEWESNGQPENNYKTTPPVLDSDGSFFLYSKLTVDKSRWQQGNVFSCSVMHEALHNHYTQKSLSLSPGGGGSGGGGSGGGGSGGGGSGGGGSGGGGSDKTHTCPPCPAPELLGGPSVFLFPPKPKDTLMISRTPEVTCVVVDVSHEDPEVKFNWYVDGVEVHNAKTKPCEEQYGSTYRCVSVLTVLHQDWLNGKEYKCKVSNKALPAPIEKTISKAKGQPREPQVYTLPPSREEMTKNQVSLTCLVKGFYPSDIAVEWESNGQPENNYKTTPPVLDSDGSFFLYSKLTVDKSRWQQGNVFSCSVMHEALHNHYTQKSLSLSPGK

SEQ ID NO: 417 - protein, 5 aa, Artificial Sequence
  Synthetic peptide
DYYMY

SEQ ID NO: 418 - protein, 17 aa, Artificial Sequence
  Synthetic peptide
IISDAGYYTYYSDIIKG

SEQ ID NO: 419 - protein, 12 aa, Artificial Sequence
  Synthetic peptide
GFPLLRHGAMDY

SEQ ID NO: 420 - protein, 11 aa, Artificial Sequence
  Synthetic peptide
KASQNVDANVA

SEQ ID NO: 421 - protein, 7 aa, Artificial Sequence
  Synthetic peptide
SASYVYW

SEQ ID NO: 422 - protein, 9 aa, Artificial Sequence
  Synthetic peptide
QQYDQQLIT

SEQ ID NO: 423 - protein, 121 aa, Artificial Sequence; identical to SEQ ID NO: 393
  Synthetic peptide

SEQ ID NO: 424 - protein, 107 aa, Artificial Sequence
  Synthetic peptide
DIQMTQSPSSLSASVGDRVTITCKASQNVDANVAWYQQKPGQAPKSLIYSASYVYWDVPSRFSGSASGTDFTLTISSVQSEDFATYYCQQYDQQLITFGGGTKLEIK

SEQ ID NO: 425 - protein, 243 aa, Artificial Sequence
  Synthetic peptide
QVQLVESGGGLVKPGESLRLSCAASGFTFSDYYMYWVRQAPGKGLEWVAIISDAGYYTYYSDIIKGRFTISRDNAKNSLYLQMNSLKAEDTAVYYCARGFPLLRHGAMDYWGQGTLVTVSSGGGGSGGGGSGGGGSDIQMTQSPSSLSASVGDRVTITCKASQNVDANVAWYQQKPGQAPKSLIYSASYVYWDVPSRFSGSASGTDFTLTISSVQSEDFATYYCQQYDQQLITFGGGTKLEIK

SEQ ID NO: 426 - protein, 498 aa, Artificial Sequence
  Synthetic peptide
QVQLVESGGGLVKPGESLRLSCAASGFTFSDYYMYWVRQAPGKGLEWVAIISDAGYYTYYSDIIKGRFTISRDNAKNSLYLQMNSLKAEDTAVYYCARGFPLLRHGAMDYWGQGTLVTVSSGGGGSGGGGSGGGGSDIQMTQSPSSLSASVGDRVTITCKASQNVDANVAWYQQKPGQAPKSLIYSASYVYWDVPSRFSGSASGTDFTLTISSVQSEDFATYYCQQYDQQLITFGGGTKLEIKSGGGGSEVQLVESGGGLVQPGGSLKLSCAASGFTFNKYAMNWVRQAPGKGLEWVARIRSKYNNYATYYADSVKDRFTISRDDSKNTAYLQMNNLKTEDTAVYYCVRHGNFGNSYISYWAYWGQGTLVTVSSGGGGSGGGGSGGGGSQTVVTQEPSLTVSPGGTVTLTCGSSTGAVTSGNYPNWVQQKPGQAPRGLIGGTKFLAPGTPARFSGSLLGGKAALTLSGVQPEDEAEYYCVLWYSNRWVFGGGTKLTVL

SEQ ID NO: 427 - protein, 986 aa, Artificial Sequence
  Synthetic peptide
QVQLVESGGGLVKPGESLRLSCAASGFTFSDYYMYWVRQAPGKGLEWVAIISDAGYYTYYSDIIKGRFTISRDNAKNSLYLQMNSLKAEDTAVYYCARGFPLLRHGAMDYWGQGTLVTVSSGGGGSGGGGSGGGGSDIQMTQSPSSLSASVGDRVTITCKASQNVDANVAWYQQKPGQAPKSLIYSASYVYWDVPSRFSGSASGTDFTLTISSVQSEDFATYYCQQYDQQLITFGGGTKLEIKSGGGGSEVQLVESGGGLVQPGGSLKLSCAASGFTFNKYAMNWVRQAPGKGLEWVARIRSKYNNYATYYADSVKDRFTISRDDSKNTAYLQMNNLKTEDTAVYYCVRHGNFGNSYISYWAYWGQGTLVTVSSGGGGSGGGGSGGGGSQTVVTQEPSLTVSPGGTVTLTCGSSTGAVTSGNYPNWVQQKPGQAPRGLIGGTKFLAPGTPARFSGSLLGGKAALTLSGVQPEDEAEYYCVLWYSNRWVFGGGTKLTVLGGGGDKTHTCPPCPAPELLGGPSVFLFPPKPKDTLMISRTPEVTCVVVDVSHEDPEVKFNWYVDGVEVHNAKTKPCEEQYGSTYRCVSVLTVLHQDWLNGKEYKCKVSNKALPAPIEKTISKAKGQPREPQVYTLPPSREEMTKNQVSLTCLVKGFYPSDIAVEWESNGQPENNYKTTPPVLDSDGSFFLYSKLTVDKSRWQQGNVFSCSVMHEALHNHYTQKSLSLSPGKGGGGSGGGGSGGGGSGGGGSGGGGSGGGGSDKTHTCPPCPAPELLGGPSVFLFPPKPKDTLMISRTPEVTCVVVDVSHEDPEVKFNWYVDGVEVHNAKTKPCEEQYGSTYRCVSVLTVLHQDWLNGKEYKCKVSNKALPAPIEKTISKAKGQPREPQVYTLPPSREEMTKNQVSLTCLVKGFYPSDIAVEWESNGQPENNYKTTPPVLDSDGSFFLYSKLTVDKSRWQQGNVFSCSVMHEALHNHYTQKSLSLSPGK

SEQ ID NO: 428 - protein, 984 aa, Artificial Sequence
  Synthetic peptide
QVQLVESGGGLVKPGESLRLSCAASGFTFSDYYMYWVRQAPGKGLEWVAIISDAGYYTYYSDIIKGRFTISRDNAKNSLYLQMNSLKAEDTAVYYCARGFPLLRHGAMDYWGQGTLVTVSSGGGGSGGGGSGGGGSDIQMTQSPSSLSASVGDRVTITCKASQNVDANVAWYQQKPGQAPKSLIYSASYVYWDVPSRFSGSASGTDFTLTISSVQSEDFATYYCQQYDQQLITFGGGTKLEIKSGGGGSEVQLVESGGGLVQPGGSLKLSCAASGFTFNKYAMNWVRQAPGKGLEWVARIRSKYNNYATYYADSVKDRFTISRDDSKNTAYLQMNNLKTEDTAVYYCVRHGNFGNSYISYWAYWGQGTLVTVSSGGGGSGGGGSGGGGSQTVVTQEPSLTVSPGGTVTLTCGSSTGAVTSGNYPNWVQQKPGQAPRGLIGGTKFLAPGTPARFSGSLLGGKAALTLSGVQPEDEAEYYCVLWYSNRWVFGGGTKLTVLGGGGDKTHTCPPCPAPELLGGPSVFLFPPKPKDTLMISRTPEVTCVVVDVSHEDPEVKFNWYVDGVEVHNAKTKPCEEQYGSTYRCVSVLTVLHQDWLNGKEYKCKVSNKALPAPIEKTISKAKGQPREPQVYTLPPSREEMTKNQVSLTCLVKGFYPSDIAVEWESNGQPENNYKTTPPVLDSDGSFFLYSKLTVDKSRWQQGNVFSCSVMHEALHNHYTQKSLSLSPGGGGSGGGGSGGGGSGGGGSGGGGSGGGGSDKTHTCPPCPAPELLGGPSVFLFPPKPKDTLMISRTPEVTCVVVDVSHEDPEVKFNWYVDGVEVHNAKTKPCEEQYGSTYRCVSVLTVLHQDWLNGKEYKCKVSNKALPAPIEKTISKAKGQPREPQVYTLPPSREEMTKNQVSLTCLVKGFYPSDIAVEWESNGQPENNYKTTPPVLDSDGSFFLYSKLTVDKSRWQQGNVFSCSVMHEALHNHYTQKSLSLSPGK

SEQ ID NO: 429 - protein, 498 aa, Artificial Sequence
  Synthetic peptide
QVQLVESGGGLVKPGESLRLSCAASGFTFSDYYMYWVRQAPGKGLEWVAIISDAGYYTYYSDIIKGRFTISRDNAKNSLYLQMNSLKAEDTAVYYCARGFPLLRHGAMDYWGQGTLVTVSSGGGGSGGGGSGGGGSDIQMTQSPSSLSASVGDRVTITCKASQNVDANVAWYQQKPGQAPKSLIYSASYVYWDVPSRFSGSASGTDFTLTISSVQSEDFATYYCQQYDQQLITFGGGTKLEIKSGGGGSEVQLVESGGGLVQPGGSLKLSCAASGFTFNKYAMNWVRQAPGKGLEWVARIRSKYNNYATYYADSVKDRFTISRDDSKNTAYLQMNNLKTEDTAVYYCVRHGNFGNSYISYWAYCGQGTLVTVSSGGGGSGGGGSGGGGSQTVVTQEPSLTVSPGGTVTLTCGSSTGAVTSGNYPNWVQQKPGQCPRGLIGGTKFLAPGTPARFSGSLLGGKAALTLSGVQPEDEAEYYCVLWYSNRWVFGGGTKLTVL

SEQ ID NO: 430 - protein, 986 aa, Artificial Sequence
  Synthetic peptide
QVQLVESGGGLVKPGESLRLSCAASGFTFSDYYMYWVRQAPGKGLEWVAIISDAGYYTYYSDIIKGRFTISRDNAKNSLYLQMNSLKAEDTAVYYCARGFPLLRHGAMDYWGQGTLVTVSSGGGGSGGGGSGGGGSDIQMTQSPSSLSASVGDRVTITCKASQNVDANVAWYQQKPGQAPKSLIYSASYVYWDVPSRFSGSASGTDFTLTISSVQSEDFATYYCQQYDQQLITFGGGTKLEIKSGGGGSEVQLVESGGGLVQPGGSLKLSCAASGFTFNKYAMNWVRQAPGKGLEWVARIRSKYNNYATYYADSVKDRFTISRDDSKNTAYLQMNNLKTEDTAVYYCVRHGNFGNSYISYWAYCGQGTLVTVSSGGGGSGGGGSGGGGSQTVVTQEPSLTVSPGGTVTLTCGSSTGAVTSGNYPNWVQQKPGQCPRGLIGGTKFLAPGTPARFSGSLLGGKAALTLSGVQPEDEAEYYCVLWYSNRWVFGGGTKLTVLGGGGDKTHTCPPCPAPELLGGPSVFLFPPKPKDTLMISRTPEVTCVVVDVSHEDPEVKFNWYVDGVEVHNAKTKPCEEQYGSTYRCVSVLTVLHQDWLNGKEYKCKVSNKALPAPIEKTISKAKGQPREPQVYTLPPSREEMTKNQVSLTCLVKGFYPSDIAVEWESNGQPENNYKTTPPVLDSDGSFFLYSKLTVDKSRWQQGNVFSCSVMHEALHNHYTQKSLSLSPGKGGGGSGGGGSGGGGSGGGGSGGGGSGGGGSDKTHTCPPCPAPELLGGPSVFLFPPKPKDTLMISRTPEVTCVVVDVSHEDPEVKFNWYVDGVEVHNAKTKPCEEQYGSTYRCVSVLTVLHQDWLNGKEYKCKVSNKALPAPIEKTISKAKGQPREPQVYTLPPSREEMTKNQVSLTCLVKGFYPSDIAVEWESNGQPENNYKTTPPVLDSDGSFFLYSKLTVDKSRWQQGNVFSCSVMHEALHNHYTQKSLSLSPGK

SEQ ID NO: 431 - protein, 984 aa, Artificial Sequence
  Synthetic peptide
QVQLVESGGGLVKPGESLRLSCAASGFTFSDYYMYWVRQAPGKGLEWVAIISDAGYYTYYSDIIKGRFTISRDNAKNSLYLQMNSLKAEDTAVYYCARGFPLLRHGAMDYWGQGTLVTVSSGGGGSGGGGSGGGGSDIQMTQSPSSLSASVGDRVTITCKASQNVDANVAWYQQKPGQAPKSLIYSASYVYWDVPSRFSGSASGTDFTLTISSVQSEDFATYYCQQYDQQLITFGGGTKLEIKSGGGGSEVQLVESGGGLVQPGGSLKLSCAASGFTFNKYAMNWVRQAPGKGLEWVARIRSKYNNYATYYADSVKDRFTISRDDSKNTAYLQMNNLKTEDTAVYYCVRHGNFGNSYISYWAYCGQGTLVTVSSGGGGSGGGGSGGGGSQTVVTQEPSLTVSPGGTVTLTCGSSTGAVTSGNYPNWVQQKPGQCPRGLIGGTKFLAPGTPARFSGSLLGGKAALTLSGVQPEDEAEYYCVLWYSNRWVFGGGTKLTVLGGGGDKTHTCPPCPAPELLGGPSVFLFPPKPKDTLMISRTPEVTCVVVDVSHEDPEVKFNWYVDGVEVHNAKTKPCEEQYGSTYRCVSVLTVLHQDWLNGKEYKCKVSNKALPAPIEKTISKAKGQPREPQVYTLPPSREEMTKNQVSLTCLVKGFYPSDIAVEWESNGQPENNYKTTPPVLDSDGSFFLYSKLTVDKSRWQQGNVFSCSVMHEALHNHYTQKSLSLSPGGGGSGGGGSGGGGSGGGGSGGGGSGGGGSDKTHTCPPCPAPELLGGPSVFLFPPKPKDTLMISRTPEVTCVVVDVSHEDPEVKFNWYVDGVEVHNAKTKPCEEQYGSTYRCVSVLTVLHQDWLNGKEYKCKVSNKALPAPIEKTISKAKGQPREPQVYTLPPSREEMTKNQVSLTCLVKGFYPSDIAVEWESNGQPENNYKTTPPVLDSDGSFFLYSKLTVDKSRWQQGNVFSCSVMHEALHNHYTQKSLSLSPGK

SEQ ID NO: 432 - protein, 5 aa, Artificial Sequence
  Synthetic peptide
DYYMY

SEQ ID NO: 433 - protein, 17 aa, Artificial Sequence
  Synthetic peptide
IISDAGYYTYYSDIIKG

SEQ ID NO: 434 - protein, 12 aa, Artificial Sequence
  Synthetic peptide
GFPLLRHGAMDY

SEQ ID NO: 435 - protein, 11 aa, Artificial Sequence
  Synthetic peptide
KASQNVDANVA

SEQ ID NO: 436 - protein, 7 aa, Artificial Sequence
  Synthetic peptide
SASYVYW

SEQ ID NO: 437 - protein, 9 aa, Artificial Sequence
  Synthetic peptide
QQYDQQLIT

SEQ ID NO: 438 - protein, 121 aa, Artificial Sequence; identical to SEQ ID NO: 318
  Synthetic peptide

SEQ ID NO: 439 - protein, 107 aa, Artificial Sequence
  Synthetic peptide
DIQMTQSPSSLSASVGDRVTITCKASQNVDANVAWYQQKPGQAPKSLIYSASYVYWDVPSRFSGSASGTDFTLTISSVQSEDFATYYCQQYDQQLITFGCGTKLEIK

SEQ ID NO: 440 - protein, 243 aa, Artificial Sequence
  Synthetic peptide
QVQLVESGGGLVKPGESLRLSCAASGFTFSDYYMYWVRQAPGKCLEWVAIISDAGYYTYYSDIIKGRFTISRDNAKNSLYLQMNSLKAEDTAVYYCARGFPLLRHGAMDYWGQGTLVTVSSGGGGSGGGGSGGGGSDIQMTQSPSSLSASVGDRVTITCKASQNVDANVAWYQQKPGQAPKSLIYSASYVYWDVPSRFSGSASGTDFTLTISSVQSEDFATYYCQQYDQQLITFGCGTKLEIK

SEQ ID NO: 441 - protein, 498 aa, Artificial Sequence
  Synthetic peptide
QVQLVESGGGLVKPGESLRLSCAASGFTFSDYYMYWVRQAPGKCLEWVAIISDAGYYTYYSDIIKGRFTISRDNAKNSLYLQMNSLKAEDTAVYYCARGFPLLRHGAMDYWGQGTLVTVSSGGGGSGGGGSGGGGSDIQMTQSPSSLSASVGDRVTITCKASQNVDANVAWYQQKPGQAPKSLIYSASYVYWDVPSRFSGSASGTDFTLTISSVQSEDFATYYCQQYDQQLITFGCGTKLEIKSGGGGSEVQLVESGGGLVQPGGSLKLSCAASGFTFNKYAMNWVRQAPGKGLEWVARIRSKYNNYATYYADSVKDRFTISRDDSKNTAYLQMNNLKTEDTAVYYCVRHGNFGNSYISYWAYWGQGTLVTVSSGGGGSGGGGSGGGGSQTVVTQEPSLTVSPGGTVTLTCGSSTGAVTSGNYPNWVQQKPGQAPRGLIGGTKFLAPGTPARFSGSLLGGKAALTLSGVQPEDEAEYYCVLWYSNRWVFGGGTKLTVL

SEQ ID NO: 442 - protein, 986 aa, Artificial Sequence
  Synthetic peptide
QVQLVESGGGLVKPGESLRLSCAASGFTFSDYYMYWVRQAPGKCLEWVAIISDAGYYTYYSDIIKGRFTISRDNAKNSLYLQMNSLKAEDTAVYYCARGFPLLRHGAMDYWGQGTLVTVSSGGGGSGGGGSGGGGSDIQMTQSPSSLSASVGDRVTITCKASQNVDANVAWYQQKPGQAPKSLIYSASYVYWDVPSRFSGSASGTDFTLTISSVQSEDFATYYCQQYDQQLITFGCGTKLEIKSGGGGSEVQLVESGGGLVQPGGSLKLSCAASGFTFNKYAMNWVRQAPGKGLEWVARIRSKYNNYATYYADSVKDRFTISRDDSKNTAYLQMNNLKTEDTAVYYCVRHGNFGNSYISYWAYWGQGTLVTVSSGGGGSGGGGSGGGGSQTVVTQEPSLTVSPGGTVTLTCGSSTGAVTSGNYPNWVQQKPGQAPRGLIGGTKFLAPGTPARFSGSLLGGKAALTLSGVQPEDEAEYYCVLWYSNRWVFGGGTKLTVLGGGGDKTHTCPPCPAPELLGGPSVFLFPPKPKDTLMISRTPEVTCVVVDVSHEDPEVKFNWYVDGVEVHNAKTKPCEEQYGSTYRCVSVLTVLHQDWLNGKEYKCKVSNKALPAPIEKTISKAKGQPREPQVYTLPPSREEMTKNQVSLTCLVKGFYPSDIAVEWESNGQPENNYKTTPPVLDSDGSFFLYSKLTVDKSRWQQGNVFSCSVMHEALHNHYTQKSLSLSPGKGGGGSGGGGSGGGGSGGGGSGGGGSGGGGSDKTHTCPPCPAPELLGGPSVFLFPPKPKDTLMISRTPEVTCVVVDVSHEDPEVKFNWYVDGVEVHNAKTKPCEEQYGSTYRCVSVLTVLHQDWLNGKEYKCKVSNKALPAPIEKTISKAKGQPREPQVYTLPPSREEMTKNQVSLTCLVKGFYPSDIAVEWESNGQPENNYKTTPPVLDSDGSFFLYSKLTVDKSRWQQGNVFSCSVMHEALHNHYTQKSLSLSPGK

SEQ ID NO: 443 - protein, 984 aa, Artificial Sequence
  Synthetic peptide
QVQLVESGGGLVKPGESLRLSCAASGFTFSDYYMYWVRQAPGKCLEWVAIISDAGYYTYYSDIIKGRFTISRDNAKNSLYLQMNSLKAEDTAVYYCARGFPLLRHGAMDYWGQGTLVTVSSGGGGSGGGGSGGGGSDIQMTQSPSSLSASVGDRVTITCKASQNVDANVAWYQQKPGQAPKSLIYSASYVYWDVPSRFSGSASGTDFTLTISSVQSEDFATYYCQQYDQQLITFGCGTKLEIKSGGGGSEVQLVESGGGLVQPGGSLKLSCAASGFTFNKYAMNWVRQAPGKGLEWVARIRSKYNNYATYYADSVKDRFTISRDDSKNTAYLQMNNLKTEDTAVYYCVRHGNFGNSYISYWAYWGQGTLVTVSSGGGGSGGGGSGGGGSQTVVTQEPSLTVSPGGTVTLTCGSSTGAVTSGNYPNWVQQKPGQAPRGLIGGTKFLAPGTPARFSGSLLGGKAALTLSGVQPEDEAEYYCVLWYSNRWVFGGGTKLTVLGGGGDKTHTCPPCPAPELLGGPSVFLFPPKPKDTLMISRTPEVTCVVVDVSHEDPEVKFNWYVDGVEVHNAKTKPCEEQYGSTYRCVSVLTVLHQDWLNGKEYKCKVSNKALPAPIEKTISKAKGQPREPQVYTLPPSREEMTKNQVSLTCLVKGFYPSDIAVEWESNGQPENNYKTTPPVLDSDGSFFLYSKLTVDKSRWQQGNVFSCSVMHEALHNHYTQKSLSLSPGGGGSGGGGSGGGGSGGGGSGGGGSGGGGSDKTHTCPPCPAPELLGGPSVFLFPPKPKDTLMISRTPEVTCVVVDVSHEDPEVKFNWYVDGVEVHNAKTKPCEEQYGSTYRCVSVLTVLHQDWLNGKEYKCKVSNKALPAPIEKTISKAKGQPREPQVYTLPPSREEMTKNQVSLTCLVKGFYPSDIAVEWESNGQPENNYKTTPPVLDSDGSFFLYSKLTVDKSRWQQGNVFSCSVMHEALHNHYTQKSLSLSPGK

SEQ ID NO: 444 - protein, 498 aa, Artificial Sequence
  Synthetic peptide
QVQLVESGGGLVKPGESLRLSCAASGFTFSDYYMYWVRQAPGKCLEWVAIISDAGYYTYYSDIIKGRFTISRDNAKNSLYLQMNSLKAEDTAVYYCARGFPLLRHGAMDYWGQGTLVTVSSGGGGSGGGGSGGGGSDIQMTQSPSSLSASVGDRVTITCKASQNVDANVAWYQQKPGQAPKSLIYSASYVYWDVPSRFSGSASGTDFTLTISSVQSEDFATYYCQQYDQQLITFGCGTKLEIKSGGGGSEVQLVESGGGLVQPGGSLKLSCAASGFTFNKYAMNWVRQAPGKGLEWVARIRSKYNNYATYYADSVKDRFTISRDDSKNTAYLQMNNLKTEDTAVYYCVRHGNFGNSYISYWAYCGQGTLVTVSSGGGGSGGGGSGGGGSQTVVTQEPSLTVSPGGTVTLTCGSSTGAVTSGNYPNWVQQKPGQCPRGLIGGTKFLAPGTPARFSGSLLGGKAALTLSGVQPEDEAEYYCVLWYSNRWVFGGGTKLTVL

SEQ ID NO: 445 - protein, 986 aa, Artificial Sequence
  Synthetic peptide
QVQLVESGGGLVKPGESLRLSCAASGFTFSDYYMYWVRQAPGKCLEWVAIISDAGYYTYYSDIIKGRFTISRDNAKNSLYLQMNSLKAEDTAVYYCARGFPLLRHGAMDYWGQGTLVTVSSGGGGSGGGGSGGGGSDIQMTQSPSSLSASVGDRVTITCKASQNVDANVAWYQQKPGQAPKSLIYSASYVYWDVPSRFSGSASGTDFTLTISSVQSEDFATYYCQQYDQQLITFGCGTKLEIKSGGGGSEVQLVESGGGLVQPGGSLKLSCAASGFTFNKYAMNWVRQAPGKGLEWVARIRSKYNNYATYYADSVKDRFTISRDDSKNTAYLQMNNLKTEDTAVYYCVRHGNFGNSYISYWAYCGQGTLVTVSSGGGGSGGGGSGGGGSQTVVTQEPSLTVSPGGTVTLTCGSSTGAVTSGNYPNWVQQKPGQCPRGLIGGTKFLAPGTPARFSGSLLGGKAALTLSGVQPEDEAEYYCVLWYSNRWVFGGGTKLTVLGGGGDKTHTCPPCPAPELLGGPSVFLFPPKPKDTLMISRTPEVTCVVVDVSHEDPEVKFNWYVDGVEVHNAKTKPCEEQYGSTYRCVSVLTVLHQDWLNGKEYKCKVSNKALPAPIEKTISKAKGQPREPQVYTLPPSREEMTKNQVSLTCLVKGFYPSDIAVEWESNGQPENNYKTTPPVLDSDGSFFLYSKLTVDKSRWQQGNVFSCSVMHEALHNHYTQKSLSLSPGKGGGGSGGGGSGGGGSGGGGSGGGGSGGGGSDKTHTCPPCPAPELLGGPSVFLFPPKPKDTLMISRTPEVTCVVVDVSHEDPEVKFNWYVDGVEVHNAKTKPCEEQYGSTYRCVSVLTVLHQDWLNGKEYKCKVSNKALPAPIEKTISKAKGQPREPQVYTLPPSREEMTKNQVSLTCLVKGFYPSDIAVEWESNGQPENNYKTTPPVLDSDGSFFLYSKLTVDKSRWQQGNVFSCSVMHEALHNHYTQKSLSLSPGK

SEQ ID NO: 446 - protein, 984 aa, Artificial Sequence
  Synthetic peptide
QVQLVESGGGLVKPGESLRLSCAASGFTFSDYYMYWVRQAPGKCLEWVAIISDAGYYTYYSDIIKGRFTISRDNAKNSLYLQMNSLKAEDTAVYYCARGFPLLRHGAMDYWGQGTLVTVSSGGGGSGGGGSGGGGSDIQMTQSPSSLSASVGDRVTITCKASQNVDANVAWYQQKPGQAPKSLIYSASYVYWDVPSRFSGSASGTDFTLTISSVQSEDFATYYCQQYDQQLITFGCGTKLEIKSGGGGSEVQLVESGGGLVQPGGSLKLSCAASGFTFNKYAMNWVRQAPGKGLEWVARIRSKYNNYATYYADSVKDRFTISRDDSKNTAYLQMNNLKTEDTAVYYCVRHGNFGNSYISYWAYCGQGTLVTVSSGGGGSGGGGSGGGGSQTVVTQEPSLTVSPGGTVTLTCGSSTGAVTSGNYPNWVQQKPGQCPRGLIGGTKFLAPGTPARFSGSLLGGKAALTLSGVQPEDEAEYYCVLWYSNRWVFGGGTKLTVLGGGGDKTHTCPPCPAPELLGGPSVFLFPPKPKDTLMISRTPEVTCVVVDVSHEDPEVKFNWYVDGVEVHNAKTKPCEEQYGSTYRCVSVLTVLHQDWLNGKEYKCKVSNKALPAPIEKTISKAKGQPREPQVYTLPPSREEMTKNQVSLTCLVKGFYPSDIAVEWESNGQPENNYKTTPPVLDSDGSFFLYSKLTVDKSRWQQGNVFSCSVMHEALHNHYTQKSLSLSPGGGGSGGGGSGGGGSGGGGSGGGGSGGGGSDKTHTCPPCPAPELLGGPSVFLFPPKPKDTLMISRTPEVTCVVVDVSHEDPEVKFNWYVDGVEVHNAKTKPCEEQYGSTYRCVSVLTVLHQDWLNGKEYKCKVSNKALPAPIEKTISKAKGQPREPQVYTLPPSREEMTKNQVSLTCLVKGFYPSDIAVEWESNGQPENNYKTTPPVLDSDGSFFLYSKLTVDKSRWQQGNVFSCSVMHEALHNHYTQKSLSLSPGK

SEQ ID NO: 447 - protein, 5 aa, Artificial Sequence
  Synthetic peptide
DYYMY

SEQ ID NO: 448 - protein, 17 aa, Artificial Sequence
  Synthetic peptide
IISDGGYYTYYSDIIKG

SEQ ID NO: 449 - protein, 12 aa, Artificial Sequence
  Synthetic peptide
GFPLLRHGAMDY

SEQ ID NO: 450 - protein, 11 aa, Artificial Sequence
  Synthetic peptide
KASQNVDTNVA

SEQ ID NO: 451 - protein, 7 aa, Artificial Sequence
  Synthetic peptide
SASYRYS

SEQ ID NO: 452 - protein, 9 aa, Artificial Sequence
  Synthetic peptide
QQYDSYPYT

SEQ ID NO: 453 - protein, 121 aa, Artificial Sequence; identical to SEQ ID NO: 156
  Synthetic peptide

SEQ ID NO: 454 - protein, 107 aa, Artificial Sequence; identical to SEQ ID NO: 67
  Synthetic peptide

SEQ ID NO: 455 - protein, 243 aa, Artificial Sequence
  Synthetic peptide
QVQLVESGGGLVKPGESLRLSCAASGFTFSDYYMYWVRQAPGKGLEWVAIISDGGYYTYYSDIIKGRFTISRDNAKNSLYLQMNSLKAEDTAVYYCARGFPLLRHGAMDYWGQGTLVTVSSGGGGSGGGGSGGGGSDIQMTQSPSSLSASVGDRVTITCKASQNVDTNVAWYQQKPGQAPKSLIYSASYRYSDVPSRFSGSASGTDFTLTISSVQSEDFATYYCQQYDSYPYTFGGGTKLEIK

SEQ ID NO: 456 - protein, 498 aa, Artificial Sequence
  Synthetic peptide
QVQLVESGGGLVKPGESLRLSCAASGFTFSDYYMYWVRQAPGKGLEWVAIISDGGYYTYYSDIIKGRFTISRDNAKNSLYLQMNSLKAEDTAVYYCARGFPLLRHGAMDYWGQGTLVTVSSGGGGSGGGGSGGGGSDIQMTQSPSSLSASVGDRVTITCKASQNVDTNVAWYQQKPGQAPKSLIYSASYRYSDVPSRFSGSASGTDFTLTISSVQSEDFATYYCQQYDSYPYTFGGGTKLEIKSGGGGSEVQLVESGGGLVQPGGSLKLSCAASGFTFNKYAMNWVRQAPGKGLEWVARIRSKYNNYATYYADSVKDRFTISRDDSKNTAYLQMNNLKTEDTAVYYCVRHGNFGNSYISYWAYWGQGTLVTVSSGGGGSGGGGSGGGGSQTVVTQEPSLTVSPGGTVTLTCGSSTGAVTSGNYPNWVQQKPGQAPRGLIGGTKFLAPGTPARFSGSLLGGKAALTLSGVQPEDEAEYYCVLWYSNRWVFGGGTKLTVL

SEQ ID NO: 457 - protein, 986 aa, Artificial Sequence
  Synthetic peptide
QVQLVESGGGLVKPGESLRLSCAASGFTFSDYYMYWVRQAPGKGLEWVAIISDGGYYTYYSDIIKGRFTISRDNAKNSLYLQMNSLKAEDTAVYYCARGFPLLRHGAMDYWGQGTLVTVSSGGGGSGGGGSGGGGSDIQMTQSPSSLSASVGDRVTITCKASQNVDTNVAWYQQKPGQAPKSLIYSASYRYSDVPSRFSGSASGTDFTLTISSVQSEDFATYYCQQYDSYPYTFGGGTKLEIKSGGGGSEVQLVESGGGLVQPGGSLKLSCAASGFTFNKYAMNWVRQAPGKGLEWVARIRSKYNNYATYYADSVKDRFTISRDDSKNTAYLQMNNLKTEDTAVYYCVRHGNFGNSYISYWAYWGQGTLVTVSSGGGGSGGGGSGGGGSQTVVTQEPSLTVSPGGTVTLTCGSSTGAVTSGNYPNWVQQKPGQAPRGLIGGTKFLAPGTPARFSGSLLGGKAALTLSGVQPEDEAEYYCVLWYSNRWVFGGGTKLTVLGGGGDKTHTCPPCPAPELLGGPSVFLFPPKPKDTLMISRTPEVTCVVVDVSHEDPEVKFNWYVDGVEVHNAKTKPCEEQYGSTYRCVSVLTVLHQDWLNGKEYKCKVSNKALPAPIEKTISKAKGQPREPQVYTLPPSREEMTKNQVSLTCLVKGFYPSDIAVEWESNGQPENNYKTTPPVLDSDGSFFLYSKLTVDKSRWQQGNVFSCSVMHEALHNHYTQKSLSLSPGKGGGGSGGGGSGGGGSGGGGSGGGGSGGGGSDKTHTCPPCPAPELLGGPSVFLFPPKPKDTLMISRTPEVTCVVVDVSHEDPEVKFNWYVDGVEVHNAKTKPCEEQYGSTYRCVSVLTVLHQDWLNGKEYKCKVSNKALPAPIEKTISKAKGQPREPQVYTLPPSREEMTKNQVSLTCLVKGFYPSDIAVEWESNGQPENNYKTTPPVLDSDGSFFLYSKLTVDKSRWQQGNVFSCSVMHEALHNHYTQKSLSLSPGK

SEQ ID NO: 458 - protein, 984 aa, Artificial Sequence
  Synthetic peptide
QVQLVESGGGLVKPGESLRLSCAASGFTFSDYYMYWVRQAPGKGLEWVAIISDGGYYTYYSDIIKGRFTISRDNAKNSLYLQMNSLKAEDTAVYYCARGFPLLRHGAMDYWGQGTLVTVSSGGGGSGGGGSGGGGSDIQMTQSPSSLSASVGDRVTITCKASQNVDTNVAWYQQKPGQAPKSLIYSASYRYSDVPSRFSGSASGTDFTLTISSVQSEDFATYYCQQYDSYPYTFGGGTKLEIKSGGGGSEVQLVESGGGLVQPGGSLKLSCAASGFTFNKYAMNWVRQAPGKGLEWVARIRSKYNNYATYYADSVKDRFTISRDDSKNTAYLQMNNLKTEDTAVYYCVRHGNFGNSYISYWAYWGQGTLVTVSSGGGGSGGGGSGGGGSQTVVTQEPSLTVSPGGTVTLTCGSSTGAVTSGNYPNWVQQKPGQAPRGLIGGTKFLAPGTPARFSGSLLGGKAALTLSGVQPEDEAEYYCVLWYSNRWVFGGGTKLTVLGGGGDKTHTCPPCPAPELLGGPSVFLFPPKPKDTLMISRTPEVTCVVVDVSHEDPEVKFNWYVDGVEVHNAKTKPCEEQYGSTYRCVSVLTVLHQDWLNGKEYKCKVSNKALPAPIEKTISKAKGQPREPQVYTLPPSREEMTKNQVSLTCLVKGFYPSDIAVEWESNGQPENNYKTTPPVLDSDGSFFLYSKLTVDKSRWQQGNVFSCSVMHEALHNHYTQKSLSLSPGGGGSGGGGSGGGGSGGGGSGGGGSGGGGSDKTHTCPPCPAPELLGGPSVFLFPPKPKDTLMISRTPEVTCVVVDVSHEDPEVKFNWYVDGVEVHNAKTKPCEEQYGSTYRCVSVLTVLHQDWLNGKEYKCKVSNKALPAPIEKTISKAKGQPREPQVYTLPPSREEMTKNQVSLTCLVKGFYPSDIAVEWESNGQPENNYKTTPPVLDSDGSFFLYSKLTVDKSRWQQGNVFSCSVMHEALHNHYTQKSLSLSPGK

SEQ ID NO: 459 - protein, 498 aa, Artificial Sequence
  Synthetic peptide
QVQLVESGGGLVKPGESLRLSCAASGFTFSDYYMYWVRQAPGKGLEWVAIISDGGYYTYYSDIIKGRFTISRDNAKNSLYLQMNSLKAEDTAVYYCARGFPLLRHGAMDYWGQGTLVTVSSGGGGSGGGGSGGGGSDIQMTQSPSSLSASVGDRVTITCKASQNVDTNVAWYQQKPGQAPKSLIYSASYRYSDVPSRFSGSASGTDFTLTISSVQSEDFATYYCQQYDSYPYTFGGGTKLEIKSGGGGSEVQLVESGGGLVQPGGSLKLSCAASGFTFNKYAMNWVRQAPGKGLEWVARIRSKYNNYATYYADSVKDRFTISRDDSKNTAYLQMNNLKTEDTAVYYCVRHGNFGNSYISYWAYCGQGTLVTVSSGGGGSGGGGSGGGGSQTVVTQEPSLTVSPGGTVTLTCGSSTGAVTSGNYPNWVQQKPGQCPRGLIGGTKFLAPGTPARFSGSLLGGKAALTLSGVQPEDEAEYYCVLWYSNRWVFGGGTKLTVL

SEQ ID NO: 460 - protein, 986 aa, Artificial Sequence
  Synthetic peptide
QVQLVESGGGLVKPGESLRLSCAASGFTFSDYYMYWVRQAPGKGLEWVAIISDGGYYTYYSDIIKGRFTISRDNAKNSLYLQMNSLKAEDTAVYYCARGFPLLRHGAMDYWGQGTLVTVSSGGGGSGGGGSGGGGSDIQMTQSPSSLSASVGDRVTITCKASQNVDTNVAWYQQKPGQAPKSLIYSASYRYSDVPSRFSGSASGTDFTLTISSVQSEDFATYYCQQYDSYPYTFGGGTKLEIKSGGGGSEVQLVESGGGLVQPGGSLKLSCAASGFTFNKYAMNWVRQAPGKGLEWVARIRSKYNNYATYYADSVKDRFTISRDDSKNTAYLQMNNLKTEDTAVYYCVRHGNFGNSYISYWAYCGQGTLVTVSSGGGGSGGGGSGGGGSQTVVTQEPSLTVSPGGTVTLTCGSSTGAVTSGNYPNWVQQKPGQCPRGLIGGTKFLAPGTPARFSGSLLGGKAALTLSGVQPEDEAEYYCVLWYSNRWVFGGGTKLTVLGGGGDKTHTCPPCPAPELLGGPSVFLFPPKPKDTLMISRTPEVTCVVVDVSHEDPEVKFNWYVDGVEVHNAKTKPCEEQYGSTYRCVSVLTVLHQDWLNGKEYKCKVSNKALPAPIEKTISKAKGQPREPQVYTLPPSREEMTKNQVSLTCLVKGFYPSDIAVEWESNGQPENNYKTTPPVLDSDGSFFLYSKLTVDKSRWQQGNVFSCSVMHEALHNHYTQKSLSLSPGKGGGGSGGGGSGGGGSGGGGSGGGGSGGGGSDKTHTCPPCPAPELLGGPSVFLFPPKPKDTLMISRTPEVTCVVVDVSHEDPEVKFNWYVDGVEVHNAKTKPCEEQYGSTYRCVSVLTVLHQDWLNGKEYKCKVSNKALPAPIEKTISKAKGQPREPQVYTLPPSREEMTKNQVSLTCLVKGFYPSDIAVEWESNGQPENNYKTTPPVLDSDGSFFLYSKLTVDKSRWQQGNVFSCSVMHEALHNHYTQKSLSLSPGK

SEQ ID NO: 461 - protein, 984 aa, Artificial Sequence
  Synthetic peptide
QVQLVESGGGLVKPGESLRLSCAASGFTFSDYYMYWVRQAPGKGLEWVAIISDGGYYTYYSDIIKGRFTISRDNAKNSLYLQMNSLKAEDTAVYYCARGFPLLRHGAMDYWGQGTLVTVSSGGGGSGGGGSGGGGSDIQMTQSPSSLSASVGDRVTITCKASQNVDTNVAWYQQKPGQAPKSLIYSASYRYSDVPSRFSGSASGTDFTLTISSVQSEDFATYYCQQYDSYPYTFGGGTKLEIKSGGGGSEVQLVESGGGLVQPGGSLKLSCAASGFTFNKYAMNWVRQAPGKGLEWVARIRSKYNNYATYYADSVKDRFTISRDDSKNTAYLQMNNLKTEDTAVYYCVRHGNFGNSYISYWAYCGQGTLVTVSSGGGGSGGGGSGGGGSQTVVTQEPSLTVSPGGTVTLTCGSSTGAVTSGNYPNWVQQKPGQCPRGLIGGTKFLAPGTPARFSGSLLGGKAALTLSGVQPEDEAEYYCVLWYSNRWVFGGGTKLTVLGGGGDKTHTCPPCPAPELLGGPSVFLFPPKPKDTLMISRTPEVTCVVVDVSHEDPEVKFNWYVDGVEVHNAKTKPCEEQYGSTYRCVSVLTVLHQDWLNGKEYKCKVSNKALPAPIEKTISKAKGQPREPQVYTLPPSREEMTKNQVSLTCLVKGFYPSDIAVEWESNGQPENNYKTTPPVLDSDGSFFLYSKLTVDKSRWQQGNVFSCSVMHEALHNHYTQKSLSLSPGGGGSGGGGSGGGGSGGGGSGGGGSGGGGSDKTHTCPPCPAPELLGGPSVFLFPPKPKDTLMISRTPEVTCVVVDVSHEDPEVKFNWYVDGVEVHNAKTKPCEEQYGSTYRCVSVLTVLHQDWLNGKEYKCKVSNKALPAPIEKTISKAKGQPREPQVYTLPPSREEMTKNQVSLTCLVKGFYPSDIAVEWESNGQPENNYKTTPPVLDSDGSFFLYSKLTVDKSRWQQGNVFSCSVMHEALHNHYTQKSLSLSPGK

SEQ ID NO: 462 - protein, 5 aa, Artificial Sequence
  Synthetic peptide
DYYMY

SEQ ID NO: 463 - protein, 17 aa, Artificial Sequence
  Synthetic peptide
IISDGGYYTYYSDIIKG

SEQ ID NO: 464 - protein, 12 aa, Artificial Sequence
  Synthetic peptide
GFPLLRHGAMDY

SEQ ID NO: 465 - protein, 11 aa, Artificial Sequence
  Synthetic peptide
KASQNVDTNVA

SEQ ID NO: 466 - protein, 7 aa, Artificial Sequence
  Synthetic peptide
SASYRYS

SEQ ID NO: 467 - protein, 9 aa, Artificial Sequence
  Synthetic peptide
QQYDSYPYT

SEQ ID NO: 468 - protein, 121 aa, Artificial Sequence; identical to SEQ ID NO: 162
  Synthetic peptide

SEQ ID NO: 469 - protein, 107 aa, Artificial Sequence; identical to SEQ ID NO: 73
  Synthetic peptide

SEQ ID NO: 470 - protein, 243 aa, Artificial Sequence
  Synthetic peptide
QVQLVESGGGLVKPGESLRLSCAASGFTFSDYYMYWVRQAPGKCLEWVAIISDGGYYTYYSDIIKGRFTISRDNAKNSLYLQMNSLKAEDTAVYYCARGFPLLRHGAMDYWGQGTLVTVSSGGGGSGGGGSGGGGSDIQMTQSPSSLSASVGDRVTITCKASQNVDTNVAWYQQKPGQAPKSLIYSASYRYSDVPSRFSGSASGTDFTLTISSVQSEDFATYYCQQYDSYPYTFGCGTKLEIK

SEQ ID NO: 471 - protein, 498 aa, Artificial Sequence
  Synthetic peptide
QVQLVESGGGLVKPGESLRLSCAASGFTFSDYYMYWVRQAPGKCLEWVAIISDGGYYTYYSDIIKGRFTISRDNAKNSLYLQMNSLKAEDTAVYYCARGFPLLRHGAMDYWGQGTLVTVSSGGGGSGGGGSGGGGSDIQMTQSPSSLSASVGDRVTITCKASQNVDTNVAWYQQKPGQAPKSLIYSASYRYSDVPSRFSGSASGTDFTLTISSVQSEDFATYYCQQYDSYPYTFGCGTKLEIKSGGGGSEVQLVESGGGLVQPGGSLKLSCAASGFTFNKYAMNWVRQAPGKGLEWVARIRSKYNNYATYYADSVKDRFTISRDDSKNTAYLQMNNLKTEDTAVYYCVRHGNFGNSYISYWAYWGQGTLVTVSSGGGGSGGGGSGGGGSQTVVTQEPSLTVSPGGTVTLTCGSSTGAVTSGNYPNWVQQKPGQAPRGLIGGTKFLAPGTPARFSGSLLGGKAALTLSGVQPEDEAEYYCVLWYSNRWVFGGGTKLTVL

SEQ ID NO: 472 - protein, 986 aa, Artificial Sequence
  Synthetic peptide
QVQLVESGGGLVKPGESLRLSCAASGFTFSDYYMYWVRQAPGKCLEWVAIISDGGYYTYYSDIIKGRFTISRDNAKNSLYLQMNSLKAEDTAVYYCARGFPLLRHGAMDYWGQGTLVTVSSGGGGSGGGGSGGGGSDIQMTQSPSSLSASVGDRVTITCKASQNVDTNVAWYQQKPGQAPKSLIYSASYRYSDVPSRFSGSASGTDFTLTISSVQSEDFATYYCQQYDSYPYTFGCGTKLEIKSGGGGSEVQLVESGGGLVQPGGSLKLSCAASGFTFNKYAMNWVRQAPGKGLEWVARIRSKYNNYATYYADSVKDRFTISRDDSKNTAYLQMNNLKTEDTAVYYCVRHGNFGNSYISYWAYWGQGTLVTVSSGGGGSGGGGSGGGGSQTVVTQEPSLTVSPGGTVTLTCGSSTGAVTSGNYPNWVQQKPGQAPRGLIGGTKFLAPGTPARFSGSLLGGKAALTLSGVQPEDEAEYYCVLWYSNRWVFGGGTKLTVLGGGGDKTHTCPPCPAPELLGGPSVFLFPPKPKDTLMISRTPEVTCVVVDVSHEDPEVKFNWYVDGVEVHNAKTKPCEEQYGSTYRCVSVLTVLHQDWLNGKEYKCKVSNKALPAPIEKTISKAKGQPREPQVYTLPPSREEMTKNQVSLTCLVKGFYPSDIAVEWESNGQPENNYKTTPPVLDSDGSFFLYSKLTVDKSRWQQGNVFSCSVMHEALHNHYTQKSLSLSPGKGGGGSGGGGSGGGGSGGGGSGGGGSGGGGSDKTHTCPPCPAPELLGGPSVFLFPPKPKDTLMISRTPEVTCVVVDVSHEDPEVKFNWYVDGVEVHNAKTKPCEEQYGSTYRCVSVLTVLHQDWLNGKEYKCKVSNKALPAPIEKTISKAKGQPREPQVYTLPPSREEMTKNQVSLTCLVKGFYPSDIAVEWESNGQPENNYKTTPPVLDSDGSFFLYSKLTVDKSRWQQGNVFSCSVMHEALHNHYTQKSLSLSPGK

SEQ ID NO: 473 - protein, 984 aa, Artificial Sequence
  Synthetic peptide
QVQLVESGGGLVKPGESLRLSCAASGFTFSDYYMYWVRQAPGKCLEWVAIISDGGYYTYYSDIIKGRFTISRDNAKNSLYLQMNSLKAEDTAVYYCARGFPLLRHGAMDYWGQGTLVTVSSGGGGSGGGGSGGGGSDIQMTQSPSSLSASVGDRVTITCKASQNVDTNVAWYQQKPGQAPKSLIYSASYRYSDVPSRFSGSASGTDFTLTISSVQSEDFATYYCQQYDSYPYTFGCGTKLEIKSGGGGSEVQLVESGGGLVQPGGSLKLSCAASGFTFNKYAMNWVRQAPGKGLEWVARIRSKYNNYATYYADSVKDRFTISRDDSKNTAYLQMNNLKTEDTAVYYCVRHGNFGNSYISYWAYWGQGTLVTVSSGGGGSGGGGSGGGGSQTVVTQEPSLTVSPGGTVTLTCGSSTGAVTSGNYPNWVQQKPGQAPRGLIGGTKFLAPGTPARFSGSLLGGKAALTLSGVQPEDEAEYYCVLWYSNRWVFGGGTKLTVLGGGGDKTHTCPPCPAPELLGGPSVFLFPPKPKDTLMISRTPEVTCVVVDVSHEDPEVKFNWYVDGVEVHNAKTKPCEEQYGSTYRCVSVLTVLHQDWLNGKEYKCKVSNKALPAPIEKTISKAKGQPREPQVYTLPPSREEMTKNQVSLTCLVKGFYPSDIAVEWESNGQPENNYKTTPPVLDSDGSFFLYSKLTVDKSRWQQGNVFSCSVMHEALHNHYTQKSLSLSPGGGGSGGGGSGGGGSGGGGSGGGGSGGGGSDKTHTCPPCPAPELLGGPSVFLFPPKPKDTLMISRTPEVTCVVVDVSHEDPEVKFNWYVDGVEVHNAKTKPCEEQYGSTYRCVSVLTVLHQDWLNGKEYKCKVSNKALPAPIEKTISKAKGQPREPQVYTLPPSREEMTKNQVSLTCLVKGFYPSDIAVEWESNGQPENNYKTTPPVLDSDGSFFLYSKLTVDKSRWQQGNVFSCSVMHEALHNHYTQKSLSLSPGK

SEQ ID NO: 474 - protein, 498 aa, Artificial Sequence
  Synthetic peptide
QVQLVESGGGLVKPGESLRLSCAASGFTFSDYYMYWVRQAPGKCLEWVAIISDGGYYTYYSDIIKGRFTISRDNAKNSLYLQMNSLKAEDTAVYYCARGFPLLRHGAMDYWGQGTLVTVSSGGGGSGGGGSGGGGSDIQMTQSPSSLSASVGDRVTITCKASQNVDTNVAWYQQKPGQAPKSLIYSASYRYSDVPSRFSGSASGTDFTLTISSVQSEDFATYYCQQYDSYPYTFGCGTKLEIKSGGGGSEVQLVESGGGLVQPGGSLKLSCAASGFTFNKYAMNWVRQAPGKGLEWVARIRSKYNNYATYYADSVKDRFTISRDDSKNTAYLQMNNLKTEDTAVYYCVRHGNFGNSYISYWAYCGQGTLVTVSSGGGGSGGGGSGGGGSQTVVTQEPSLTVSPGGTVTLTCGSSTGAVTSGNYPNWVQQKPGQCPRGLIGGTKFLAPGTPARFSGSLLGGKAALTLSGVQPEDEAEYYCVLWYSNRWVFGGGTKLTVL

SEQ ID NO: 475 - protein, 986 aa, Artificial Sequence
  Synthetic peptide
QVQLVESGGGLVKPGESLRLSCAASGFTFSDYYMYWVRQAPGKCLEWVAIISDGGYYTYYSDIIKGRFTISRDNAKNSLYLQMNSLKAEDTAVYYCARGFPLLRHGAMDYWGQGTLVTVSSGGGGSGGGGSGGGGSDIQMTQSPSSLSASVGDRVTITCKASQNVDTNVAWYQQKPGQAPKSLIYSASYRYSDVPSRFSGSASGTDFTLTISSVQSEDFATYYCQQYDSYPYTFGCGTKLEIKSGGGGSEVQLVESGGGLVQPGGSLKLSCAASGFTFNKYAMNWVRQAPGKGLEWVARIRSKYNNYATYYADSVKDRFTISRDDSKNTAYLQMNNLKTEDTAVYYCVRHGNFGNSYISYWAYCGQGTLVTVSSGGGGSGGGGSGGGGSQTVVTQEPSLTVSPGGTVTLTCGSSTGAVTSGNYPNWVQQKPGQCPRGLIGGTKFLAPGTPARFSGSLLGGKAALTLSGVQPEDEAEYYCVLWYSNRWVFGGGTKLTVLGGGGDKTHTCPPCPAPELLGGPSVFLFPPKPKDTLMISRTPEVTCVVVDVSHEDPEVKFNWYVDGVEVHNAKTKPCEEQYGSTYRCVSVLTVLHQDWLNGKEYKCKVSNKALPAPIEKTISKAKGQPREPQVYTLPPSREEMTKNQVSLTCLVKGFYPSDIAVEWESNGQPENNYKTTPPVLDSDGSFFLYSKLTVDKSRWQQGNVFSCSVMHEALHNHYTQKSLSLSPGKGGGGSGGGGSGGGGSGGGGSGGGGSGGGGSDKTHTCPPCPAPELLGGPSVFLFPPKPKDTLMISRTPEVTCVVVDVSHEDPEVKFNWYVDGVEVHNAKTKPCEEQYGSTYRCVSVLTVLHQDWLNGKEYKCKVSNKALPAPIEKTISKAKGQPREPQVYTLPPSREEMTKNQVSLTCLVKGFYPSDIAVEWESNGQPENNYKTTPPVLDSDGSFFLYSKLTVDKSRWQQGNVFSCSVMHEALHNHYTQKSLSLSPGK

SEQ ID NO: 476 - protein, 984 aa, Artificial Sequence
  Synthetic peptide
QVQLVESGGGLVKPGESLRLSCAASGFTFSDYYMYWVRQAPGKCLEWVAIISDGGYYTYYSDIIKGRFTISRDNAKNSLYLQMNSLKAEDTAVYYCARGFPLLRHGAMDYWGQGTLVTVSSGGGGSGGGGSGGGGSDIQMTQSPSSLSASVGDRVTITCKASQNVDTNVAWYQQKPGQAPKSLIYSASYRYSDVPSRFSGSASGTDFTLTISSVQSEDFATYYCQQYDSYPYTFGCGTKLEIKSGGGGSEVQLVESGGGLVQPGGSLKLSCAASGFTFNKYAMNWVRQAPGKGLEWVARIRSKYNNYATYYADSVKDRFTISRDDSKNTAYLQMNNLKTEDTAVYYCVRHGNFGNSYISYWAYCGQGTLVTVSSGGGGSGGGGSGGGGSQTVVTQEPSLTVSPGGTVTLTCGSSTGAVTSGNYPNWVQQKPGQCPRGLIGGTKFLAPGTPARFSGSLLGGKAALTLSGVQPEDEAEYYCVLWYSNRWVFGGGTKLTVLGGGGDKTHTCPPCPAPELLGGPSVFLFPPKPKDTLMISRTPEVTCVVVDVSHEDPEVKFNWYVDGVEVHNAKTKPCEEQYGSTYRCVSVLTVLHQDWLNGKEYKCKVSNKALPAPIEKTISKAKGQPREPQVYTLPPSREEMTKNQVSLTCLVKGFYPSDIAVEWESNGQPENNYKTTPPVLDSDGSFFLYSKLTVDKSRWQQGNVFSCSVMHEALHNHYTQKSLSLSPGGGGSGGGGSGGGGSGGGGSGGGGSGGGGSDKTHTCPPCPAPELLGGPSVFLFPPKPKDTLMISRTPEVTCVVVDVSHEDPEVKFNWYVDGVEVHNAKTKPCEEQYGSTYRCVSVLTVLHQDWLNGKEYKCKVSNKALPAPIEKTISKAKGQPREPQVYTLPPSREEMTKNQVSLTCLVKGFYPSDIAVEWESNGQPENNYKTTPPVLDSDGSFFLYSKLTVDKSRWQQGNVFSCSVMHEALHNHYTQKSLSLSPGK

SEQ ID NO: 477 - protein, 10 aa, Artificial Sequence
  Synthetic peptide
DKTHTCPPCP

SEQ ID NO: 478 - protein, 12 aa, Artificial Sequence
  Synthetic peptide
ERKCCVECPPCP

SEQ ID NO: 479 - protein, 16 aa, Artificial Sequence
  Synthetic peptide
ELKTPLDTTHTCPRCP

SEQ ID NO: 480 - protein, 12 aa, Artificial Sequence
  Synthetic peptide
ESKYGPPCPSCP

SEQ ID NO: 481 - protein, 994 aa, Artificial Sequence
  Synthetic peptide
QVQLVESGGGVVQSGRSLRLSCAASGFTFRNYGMHWVRQAPGKCLEWVAVIWYDGSDKYYADSVRGRFTISRDNSKNTLYLQMNSLRAEDTAVYYCARDGYDILTGNPRDFDYWGQGTLVTVSSGGGGSGGGGSGGGGSDTVMTQTPLSSHVTLGQPASISCRSSQSLVHSDGNTYLSWLQQRPGQPPRLLIYRISRRFSGVPDRFSGSGAGTDFTLEISRVEAEDVGVYYCMQSTHVPRTFGCGTKVEIKSGGGGSEVQLVESGGGLVQPGGSLKLSCAASGFTFNKYAMNWVRQAPGKGLEWVARIRSKYNNYATYYADSVKDRFTISRDDSKNTAYLQMNNLKTEDTAVYYCVRHGNFGNSYISYWAYWGQGTLVTVSSGGGGSGGGGSGGGGSQTVVTQEPSLTVSPGGTVTLTCGSSTGAVTSGNYPNWVQQKPGQAPRGLIGGTKFLAPGTPARFSGSLLGGKAALTLSGVQPEDEAEYYCVLWYSNRWVFGGGTKLTVLGGGGDKTHTCPPCPAPELLGGPSVFLFPPKPKDTLMISRTPEVTCVVVDVSHEDPEVKFNWYVDGVEVHNAKTKPCEEQYGSTYRCVSVLTVLHQDWLNGKEYKCKVSNKALPAPIEKTISKAKGQPREPQVYTLPPSREEMTKNQVSLTCLVKGFYPSDIAVEWESNGQPENNYKTTPPVLDSDGSFFLYSKLTVDKSRWQQGNVFSCSVMHEALHNHYTQKSLSLSPGKGGGGSGGGGSGGGGSGGGGSGGGGSGGGGSDKTHTCPPCPAPELLGGPSVFLFPPKPKDTLMISRTPEVTCVVVDVSHEDPEVKFNWYVDGVEVHNAKTKPCEEQYGSTYRCVSVLTVLHQDWLNGKEYKCKVSNKALPAPIEKTISKAKGQPREPQVYTLPPSREEMTKNQVSLTCLVKGFYPSDIAVEWESNGQPENNYKTTPPVLDSDGSFFLYSKLTVDKSRWQQGNVFSCSVMHEALHNHYTQKSLSLSPGK

SEQ ID NO: 482 - protein, 984 aa, Artificial Sequence
  Synthetic peptide
QVQLVESGGGVVQSGRSLRLSCAASGFTFRNYGMHWVRQAPGKCLEWVAVIWYDGSDKYYADSVRGRFTISRDNSKNTLYLQMNSLRAEDTAVYYCARDGYDILTGNPRDFDYWGQGTLVTVSSGGGGSGGGGSGGGGSDTVMTQTPLSSHVTLGQPASISCRSSQSLVHSDGNTYLSWLQQRPGQPPRLLIYRISRRFSGVPDRFSGSGAGTDFTLEISRVEAEDVGVYYCMQSTHVPRTFGCGTKVEIKSGGGGSEVQLVESGGGLVQPGGSLKLSCAASGFTFNKYAMNWVRQAPGKGLEWVARIRSKYNNYATYYADSVKDRFTISRDDSKNTAYLQMNNLKTEDTAVYYCVRHGNFGNSYISYWAYWGQGTLVTVSSGGGGSGGGGSGGGGSQTVVTQEPSLTVSPGGTVTLTCGSSTGAVTSGNYPNWVQQKPGQAPRGLIGGTKFLAPGTPARFSGSLLGGKAALTLSGVQPEDEAEYYCVLWYSNRWVFGGGTKLTVLGGGGDKTHTCPPCPAPELLGGPSVFLFPPKPKDTLMISRTPEVTCVVVDVSHEDPEVKFNWYVDGVEVHNAKTKPCEEQYGSTYRCVSVLTVLHQDWLNGKEYKCKVSNKALPAPIEKTISKAKGQPREPQVYTLPPSREEMTKNQVSLTCLVKGFYPSDIAVEWESNGQPENNYKTTPPVLDSDGSFFLYSKLTVDKSRWQQGNVFSCSVMHEALHNHYTQKSLSLSPGKGGGGSGGGGSGGGGSGGGGSGGGGSGGGGSAPELLGGPSVFLFPPKPKDTLMISRTPEVTCVVVDVSHEDPEVKFNWYVDGVEVHNAKTKPCEEQYGSTYRCVSVLTVLHQDWLNGKEYKCKVSNKALPAPIEKTISKAKGQPREPQVYTLPPSREEMTKNQVSLTCLVKGFYPSDIAVEWESNGQPENNYKTTPPVLDSDGSFFLYSKLTVDKSRWQQGNVFSCSVMHEALHNHYTQKSLSLSPGK

SEQ ID NO: 483 - protein, 1004 aa, Artificial Sequence
  Synthetic peptide
QVQLVESGGGVVQSGRSLRLSCAASGFTFRNYGMHWVRQAPGKCLEWVAVIWYDGSDKYYADSVRGRFTISRDNSKNTLYLQMNSLRAEDTAVYYCARDGYDILTGNPRDFDYWGQGTLVTVSSGGGGSGGGGSGGGGSDTVMTQTPLSSHVTLGQPASISCRSSQSLVHSDGNTYLSWLQQRPGQPPRLLIYRISRRFSGVPDRFSGSGAGTDFTLEISRVEAEDVGVYYCMQSTHVPRTFGCGTKVEIKSGGGGSEVQLVESGGGLVQPGGSLKLSCAASGFTFNKYAMNWVRQAPGKGLEWVARIRSKYNNYATYYADSVKDRFTISRDDSKNTAYLQMNNLKTEDTAVYYCVRHGNFGNSYISYWAYWGQGTLVTVSSGGGGSGGGGSGGGGSQTVVTQEPSLTVSPGGTVTLTCGSSTGAVTSGNYPNWVQQKPGQAPRGLIGGTKFLAPGTPARFSGSLLGGKAALTLSGVQPEDEAEYYCVLWYSNRWVFGGGTKLTVLGGGGDKTHTCPPCPAPELLGGPSVFLFPPKPKDTLMISRTPEVTCVVVDVSHEDPEVKFNWYVDGVEVHNAKTKPCEEQYGSTYRCVSVLTVLHQDWLNGKEYKCKVSNKALPAPIEKTISKAKGGGGSGGGGSGGGGSGGGGSDKTHTCPPCPAPELLGGPSVFLFPPKPKDTLMISRTPEVTCVVVDVSHEDPEVKFNWYVDGVEVHNAKTKPCEEQYGSTYRCVSVLTVLHQDWLNGKEYKCKVSNKALPAPIEKTISKAKGQPREPQVYTLPPSREEMTKNQVSLTCLVKGFYPSDIAVEWESNGQPENNYKTTPPVLDSDGSFFLYSKLTVDKSRWQQGNVFSCSVMHEALHNHYTQKSLSLSPGKGGGGSGGGGSGGGGSGGGGSGQPREPQVYTLPPSREEMTKNQVSLTCLVKGFYPSDIAVEWESNGQPENNYKTTPPVLDSDGSFFLYSKLTVDKSRWQQGNVFSCSVMHEALHNHYTQKSLSLSPGK

SEQ ID NO: 484 - protein, 994 aa, Artificial Sequence
  Synthetic peptide
QVQLVESGGGVVQSGRSLRLSCAASGFTFRNYGMHWVRQAPGKCLEWVAVIWYDGSDKYYADSVRGRFTISRDNSKNTLYLQMNSLRAEDTAVYYCARDGYDILTGNPRDFDYWGQGTLVTVSSGGGGSGGGGSGGGGSDTVMTQTPLSSHVTLGQPASISCRSSQSLVHSDGNTYLSWLQQRPGQPPRLLIYRISRRFSGVPDRFSGSGAGTDFTLEISRVEAEDVGVYYCMQSTHVPRTFGCGTKVEIKSGGGGSEVQLVESGGGLVQPGGSLKLSCAASGFTFNKYAMNWVRQAPGKGLEWVARIRSKYNNYATYYADSVKDRFTISRDDSKNTAYLQMNNLKTEDTAVYYCVRHGNFGNSYISYWAYWGQGTLVTVSSGGGGSGGGGSGGGGSQTVVTQEPSLTVSPGGTVTLTCGSSTGAVTSGNYPNWVQQKPGQAPRGLIGGTKFLAPGTPARFSGSLLGGKAALTLSGVQPEDEAEYYCVLWYSNRWVFGGGTKLTVLGGGGDKTHTCPPCPAPELLGGPSVFLFPPKPKDTLMISRTPEVTCVVVDVSHEDPEVKFNWYVDGVEVHNAKTKPCEEQYGSTYRCVSVLTVLHQDWLNGKEYKCKVSNKALPAPIEKTISKAKGGGGSGGGGSGGGGSGGGGSAPELLGGPSVFLFPPKPKDTLMISRTPEVTCVVVDVSHEDPEVKFNWYVDGVEVHNAKTKPCEEQYGSTYRCVSVLTVLHQDWLNGKEYKCKVSNKALPAPIEKTISKAKGQPREPQVYTLPPSREEMTKNQVSLTCLVKGFYPSDIAVEWESNGQPENNYKTTPPVLDSDGSFFLYSKLTVDKSRWQQGNVFSCSVMHEALHNHYTQKSLSLSPGKGGGGSGGGGSGGGGSGGGGSGQPREPQVYTLPPSREEMTKNQVSLTCLVKGFYPSDIAVEWESNGQPENNYKTTPPVLDSDGSFFLYSKLTVDKSRWQQGNVFSCSVMHEALHNHYTQKSLSLSPGK

SEQ ID NO: 485 - protein, 984 aa, Artificial Sequence
  Synthetic peptide
QVQLVESGGGVVQSGRSLRLSCAASGFTFRNYGMHWVRQAPGKCLEWVAVIWYDGSDKYYADSVRGRFTISRDNSKNTLYLQMNSLRAEDTAVYYCARDGYDILTGNPRDFDYWGQGTLVTVSSGGGGSGGGGSGGGGSDTVMTQTPLSSHVTLGQPASISCRSSQSLVHSDGNTYLSWLQQRPGQPPRLLIYRISRRFSGVPDRFSGSGAGTDFTLEISRVEAEDVGVYYCMQSTHVPRTFGCGTKVEIKSGGGGSEVQLVESGGGLVQPGGSLKLSCAASGFTFNKYAMNWVRQAPGKGLEWVARIRSKYNNYATYYADSVKDRFTISRDDSKNTAYLQMNNLKTEDTAVYYCVRHGNFGNSYISYWAYWGQGTLVTVSSGGGGSGGGGSGGGGSQTVVTQEPSLTVSPGGTVTLTCGSSTGAVTSGNYPNWVQQKPGQAPRGLIGGTKFLAPGTPARFSGSLLGGKAALTLSGVQPEDEAEYYCVLWYSNRWVFGGGTKLTVLGGGGAPELLGGPSVFLFPPKPKDTLMISRTPEVTCVVVDVSHEDPEVKFNWYVDGVEVHNAKTKPCEEQYGSTYRCVSVLTVLHQDWLNGKEYKCKVSNKALPAPIEKTISKAKGGGGSGGGGSGGGGSGGGGSAPELLGGPSVFLFPPKPKDTLMISRTPEVTCVVVDVSHEDPEVKFNWYVDGVEVHNAKTKPCEEQYGSTYRCVSVLTVLHQDWLNGKEYKCKVSNKALPAPIEKTISKAKGQPREPQVYTLPPSREEMTKNQVSLTCLVKGFYPSDIAVEWESNGQPENNYKTTPPVLDSDGSFFLYSKLTVDKSRWQQGNVFSCSVMHEALHNHYTQKSLSLSPGKGGGGSGGGGSGGGGSGGGGSGQPREPQVYTLPPSREEMTKNQVSLTCLVKGFYPSDIAVEWESNGQPENNYKTTPPVLDSDGSFFLYSKLTVDKSRWQQGNVFSCSVMHEALHNHYTQKSLSLSPGK

SEQ ID NO: 486 - protein, 17 aa, Artificial Sequence
  Synthetic peptide
ELKTPLGDTTHTCPRCP

SEQ ID NO: 487 - protein, 15 aa, Artificial Sequence
  Synthetic peptide
EPKSCDKTHTCPPCP
